(19) United States
(12) Patent Application Publication
(10) Pub. No.: US 2026/0103704 A1
(43) Pub. Date: Apr. 16, 2026

(54) Antisense oligonucleotides for treatment of USHER 2A. Exon 68

(71) Applicant: Stichting Radboud Universitair medisch centrum, Nijmegen (NL)

(72) Inventor: Hendrikus Antonius Rudolfus van Wyk, Nijmegen (NL)

(21) Appl. No.: 19/116,419

(22) PCT Filed: Oct. 6, 2023
(86) PCT No.: PCT/EP2023/077674

§ 371 Date: Mar. 28, 2025

(30) Foreign Application Priority Data
Oct. 6, 2022 (EP) 22200065.5

(51) Int. Cl. C12N 15/113; A61K 31/712; A61K 31/7125; A61P 27/02

(52) U.S. Cl. CPC C12N 15/113; A61K 31/712; A61K 31/7125; A61P 27/02; C12N 2310/11; C12N 2310/315; C12N 2310/321; C12N 2320/33

(57) ABSTRACT

The invention relates to the fields of medicine and immunology. In particular, it relates to novel antisense oligonucleotides that may be used in the treatment, prevention and/or delay of an USH2A-related disease or condition.

### FIELD OF THE INVENTION

[0001] The invention relates to the fields of medicine and immunology. In particular, it relates to novel antisense oligonucleotides that may be used in the treatment, prevention and/or delay of conditions associated with USH2A.

### BACKGROUND OF THE INVENTION

[0002] Retinitis pigmentosa (RP) is a genetically and clinically heterogeneous condition that is currently still largely untreatable. Patients usually present with a progressive loss of visual function that initially manifests with night blindness and visual field constriction during adolescence, and progresses towards the loss of central vision and ultimately legal blindness in later stages of life. With a predicted overall prevalence of 1 in 4,000 individuals, RP is estimated to affect almost two million individuals worldwide. Mutations in USH2A are the most frequent cause of RP with an autosomal recessive mode of inheritance (arRP), accounting for up to 23% of all arRP cases. Besides non-syndromic RP, mutations in USH2A can also result in Usher syndrome. Patients suffering from Usher syndrome experience a double sensory impairment (combination of RP and congenital hearing impairment) making the development of a therapy to halt or delay their progressive vision loss even more urgent. The delayed onset and slowly progressive nature of USH2A-associated RP, and the nowadays often early genetic diagnosis of Usher syndrome resulting from genetic testing after the observation of congenital hearing impairment, provides ample time for therapeutic intervention.

[0003] USH2A, located on chromosome 1q41, spans approximately 800 kb and encodes two different isoforms of the usherin protein. The large usherin isoform consists of 5202 amino acids and is encoded by 72 exons. This isoform is predominantly expressed in photoreceptor cells of the retina and hair cells of the cochlea. The short isoform consists of 1546 amino acids encoded by a transcript that is built up by the 5′21 exons, and is expressed more widely. In total, over 600 different mutations have been identified in the transcript encoding the large isoform of usherin. As these mutations are mostly private and distributed all over the gene, the development of a mutation-independent therapy is preferred to eventually treat a significant group of patients (USH2A¬LOVD mutation database, https://databases.lovd.nl/shared/variants/USH2A/unique).

[0004] The size of the usherin-encoding sequence (15.6 kb) severely hampers the development of conventional gene augmentation therapy. The protein-encoding sequence by far exceeds the packaging capacity of adeno-associated virus (AAV) vectors (4.7 kb) and lentiviral vectors (8kb), which are the currently preferred vehicles for retinal gene delivery. This makes conventional AAV- and LV-mediated gene augmentation therapy for USH2A-asociated RP very challenging. An attractive alternative approach is antisense oligonucleotide (ASO)-induced splice modulation. In this approach, ASOs are applied to correct aberrant pre-mRNA splicing or to remove native in-frame exons harboring recurrent loss-of-function mutations. Both approaches aim to restore the original open reading frame and protein function. By targeting the pre-mRNA, ASOs are able to simultaneously and transiently modulate all endogenous transcripts encoding the different protein isoforms without altering transcription levels. We previously presented ASO-induced splice correction as a promising treatment option for the correction of aberrant mRNA splicing caused by the deep intronic c.7595-2144A>G mutation in USH2A (Slijkerman, R. W., et al, Therapy-Nucleic Acids, 2016. 5: p. e381).

[0005] More recently, we published the first ASO-based exon skipping therapy for mutations affecting USH2A exon 13 (Dulla, K., et al., Molecular Therapy, 2021). This single exon skipping therapy reached the clinical phase and resulted in a concordant benefit in multiple parameters of visual function (i.e. visual acuity, static perimetry and retinal imaging) without induction of any serious adverse events (Trial #NCT03780257) (ProQR Therapeutics, ProQR Announces Positive Results from Clinical Trial of QR-421a in Usher Syndrome and Plans to Start Pivotal Trials. 2021). Skipping of USH2A exon 13 was not intended to result in the removal of a single protein domain. Instead, it resulted in the loss of 4 EGF-lam domains and formation of one EGF-like hybrid domain. The resulting shortened usherin protein was shown to retain function. The amount of single USH2A exons that meet all criteria, and of which skipping is predicted to result in a functional protein, is minimal.

[0006] However, there remains a need to for treatment options for Usher syndrome patients that are affected by mutations in or malfunction of other regions of the transcript. To date treatment options for these Usher patients are limited to ear implants or hearing aids.

### SUMMARY OF THE INVENTION

[0007] The invention relates to an antisense oligonucleotide (ASOs) for skipping of exon 68 that binds to and/or is complementary to a polynucleotide with the nucleotide sequence as shown in SEQ ID NO: 1. The antisense oligonucleotide binds to and/or is complementary to a polynucleotide with a nucleotide sequence as shown in SEQ ID NO: 2 or SEQ ID NO: 3, preferably to a polynucleotide with a nucleotide sequence as shown in SEQ ID NO: 4 or SEQ ID NO:5, preferably to SEQ ID NO: 6 or SEQ ID NO:7 or a part thereof.

[0008] In certain embodiments the antisense oligonucleotide for skipping of exon 68 as described herein comprises or consists of SEQ ID NO: 8 or SEQ ID NO: 9.

[0009] In a further aspect, the invention provides for a viral vector expressing the antisense oligonucleotide for skipping of exon 68 as defined herein.

[0010] In yet a further aspect, the invention provides for a pharmaceutical composition comprising antisense oligonucleotide for skipping of exon 68 as defined herein or the viral vector as defined herein and a pharmaceutically acceptable excipient.

[0011] In yet a further aspect, the invention provides for the antisense oligonucleotide for skipping of exon 68 as defined herein or the viral vector for use as a medicament. In certain embodiments the medicament is for use in treating a USH2A-related disease or condition requiring modulating splicing of antisense oligonucleotide. In certain embodiments the USH2A-related disease or condition is USH2A-associated Retinitis pigmentosa (RP).

[0012] In yet a further aspect, the invention provides for a method for modulating splicing of USH2A in a cell, said method comprising contacting said cell with the antisense oligonucleotide for skipping of exon 68 as defined herein, the vector according as defined herein or the pharmaceutical composition as defined herein.

[0013] In yet a further aspect, the invention provides for a use of the antisense oligonucleotide for skipping of exon 68 as defined herein, the vector according as defined herein or the pharmaceutical composition as defined herein for treating an USH2A-related disease or a condition requiring modulating splicing of USH2A.

### DETAILED DESCRIPTION OF THE INVENTION

[0014] The inventors surprisingly discovered that skipping of exon 68 of USH2A restored usherin protein expression and rescued localization of rhodopsin to the photoreceptor outer segment. To translate these findings into a future treatment in man, ASOs with a high, sequence-specific exon skipping potential were designed and validated in patient-derived 3D retinal organoids. Herein in vitro and in vivo data are provided that demonstrate that ASO-induced USH2A exon 68 skipping is a highly promising treatment option USH2A-associated RP.

[0015] Accordingly, in a first aspect, the invention provides for an antisense oligonucleotide for skipping of exon 68 that binds to and/or is complementary to a polynucleotide with the nucleotide sequence as shown in SEQ ID NO: 1. Preferably the antisense oligonucleotide binds to and/or is complementary to SEQ ID NO: 2 or SEQ ID NO: 3. Preferably the antisense oligonucleotide binds to and/or is complementary to SEQ ID NO: 4 or SEQ ID NO:5. More preferably, the antisense oligonucleotide binds to and/or is complementary to SEQ ID NO: 6, SEQ ID NO:7 or a part thereof.

[0016] The terms “antisense oligonucleotide”, “ASO” and “AON” are used interchangeably herein and are understood to refer to an oligonucleotide molecule comprising a nucleotide sequence which is substantially complementary to a target nucleotide sequence in a pre-mRNA molecule, hnRNA (heterogenous nuclear RNA) or mRNA molecule. The degree of complementarity (or substantial complementarity) of the antisense sequence is preferably such that a molecule comprising the antisense sequence can form a stable hybrid with the target nucleotide sequence in the RNA molecule under physiological conditions. Binding of an ASO to its target can easily be assessed by the person skilled in the art using techniques that are known in the field such as the gel mobility shift assay as described in EP1619249.

[0017] The term “complementary” used in the context of the invention indicates that some mismatches in the antisense sequence are allowed as long as the functionality, i.e. inducing the skipping of exon 68 is achieved. Preferably, the complementarity is from 90% to 100%. In general this allows for 1 or 2 mismatches in an ASO of 20 nucleotides or 1, 2, 3 or 4 mismatches in an ASO of 40 nucleotides, or 1, 2, 3, 4, 5 or 6 mismatches in an ASO of 60 nucleotides, etc. Optionally, said ASO may further be tested by transfection into isolated cells comprising USH2A. The complementary regions are preferably designed such that, when combined, they are specific for the intron or exon in the pre-mRNA or mRNA. Such specificity may be created with various lengths of complementary regions, as this depends on the actual sequences in other (pre-)mRNA molecules in the system. The risk that the ASO will also be able to hybridize to one or more other (pre-)mRNA molecules decreases with increasing size of the ASO. It is clear that ASOs comprising mismatches in the region of complementarity but that retain the capacity to hybridize and/or bind to the targeted region(s) in the (pre-)mRNA, can be used in the invention. However, preferably at least the complementary parts do not comprise such mismatches as ASOs lacking mismatches in the complementary part typically have a higher efficiency and a higher specificity than ASOs having such mismatches in one or more complementary regions. It is thought, that higher hybridization strengths, (i.e. increasing number of interactions with the opposing strand) are favorable in increasing the efficiency of the process of interfering with the splicing or mRNA degradation machinery of the system.

[0018] The ASO according to the invention preferably does not contain a stretch of CpG, more preferably does not contain any CpG. The presence of a CpG or a stretch of CpG in an oligonucleotide is usually associated with an increased immunogenicity of said oligonucleotide (Dorn and Kippenberger, 2008). This increased immunogenicity is undesired since it may induce damage of the tissue to be treated, i.e. the inner ear. Immunogenicity may be assessed in an animal model by assessing the presence of CD4+ and/or CD8+cells and/or inflammatory mononucleocyte infiltration. Immunogenicity may also be assessed in blood of an animal or of a human being treated with an ASO according to the invention by detecting the presence of a neutralizing antibody and/or an antibody recognizing said ASO using a standard immunoassay known to the skilled person. An inflammatory reaction, type I-like interferon production, IL-12 production and/or an increase in immunogenicity may be assessed by detecting the presence or an increasing amount of a neutralizing antibody or an antibody recognizing said ASO using a standard immunoassay. The ASO according to the invention furthermore preferably has acceptable RNA binding kinetics and/or thermodynamic properties. The RNA binding kinetics and/or thermodynamic properties are at least in part determined by the melting temperature of an oligonucleotide (Tm; calculated with the oligonucleotide properties calculator (www.unc.edu/-cail/biotool/oligo/index) for single stranded RNA using the basic Tm and the nearest neighbor model), and/or the free energy of the ASO-target intron/exon complex (using RNA structure version 4.5). If a Tm is too high, the ASO is expected to be less specific. An acceptable Tm and free energy depend on the sequence of the ASO. Therefore, it is difficult to give preferred ranges for each of these parameters. An acceptable Tm may be ranged between 35 and 70° C. and an acceptable free energy may be ranged between 15 and 45 kcal/mol.

[0019] In certain embodiments, the antisense oligonucleotide for skipping of exon 68 according to the invention has a length of from about 8 to about 40 nucleotides, preferably from about 10 to about 40 nucleotides, more preferably from about 14 to about 30 nucleotides, more preferably from about 16 to about 24 nucleotides, such as 16, 17, 18, 19, 20, 21, 22, 23 or 24 nucleotides. Preferably, an ASO according to the invention has a length of at least 8, 9, 10, 11, 12, 13, 14, 15, 16, 17, 18, 19, 20, 21, 22, 23, 24, 25, 26, 27, 28, 29, 30, 31, 32, 33, 34, 35, 36, 37, 38, 39, or 40 nucleotides.

[0020] In certain embodiments, the antisense oligonucleotide for skipping of exon 68 according to the invention comprises or consists of SEQ ID NO: 8 or SEQ ID NO: 9. It was found that these ASOs are particularly efficient in skipping exon 68. These preferred ASOs preferably comprise from about 8 to about 40 nucleotides, preferably from about 10 to about 40 nucleotides, more preferably from about 14 to about 30 nucleotides, more preferably from about 16 to about 24 nucleotides, such as 16, 17, 18, 19, 20, 21, 22, 23 or 24 nucleotides, or preferably comprises or consists of at least 8, 9, 10, 11, 12, 13, 14, 15, 16, 17, 18, 19, 20, 21, 22, 23, 24, 25, 26, 27, 28, 29, 30, 31, 32, 33, 34, 35, 36, 37, 38, 39, or 40 nucleotides.

[0021] It is preferred that the antisense oligonucleotide for skipping of exon 68 of the invention comprises one or more residues that are modified to increase nuclease resistance, and/or to increase the affinity of the antisense oligonucleotide for the target sequence. Therefore, in a certain embodiment, the antisense nucleotide sequence comprises at least one nucleotide analogue or equivalent, wherein a nucleotide analogue or equivalent is defined as a residue having a modified base, and/or a modified backbone, and/or a non-natural internucleoside linkage, or a combination of these modifications.

[0022] In certain embodiments, the nucleotide analogue or equivalent comprises a modified backbone. Examples of such backbones are provided by morpholino backbones, carbamate backbones, siloxane backbones, sulfide, sulfoxide and sulfone backbones, formacetyl and thioformacetyl backbones, methyleneformacetyl backbones, riboacetyl backbones, alkene containing backbones, sulfamate, sulfonate and sulfonamide backbones, methyleneimino and methylenehydrazino backbones, and amide backbones. Phosphorodiamidate morpholino oligomers are modified backbone oligonucleotides that have previously been investigated as antisense agents.

[0023] Morpholino oligonucleotides have an uncharged backbone in which the deoxyribose sugar of DNA is replaced by a six membered ring and the phosphodiester linkage is replaced by a phosphorodiamidate linkage. Morpholino oligonucleotides are resistant to enzymatic degradation and appear to function as antisense agents by arresting translation or interfering with pre-mRNA splicing rather than by activating RNase H. Morpholino oligonucleotides have been successfully delivered to tissue culture cells by methods that physically disrupt the cell membrane, and one study comparing several of these methods found that scrape loading was the most efficient method of delivery; however, because the morpholino backbone is uncharged, cationic lipids are not effective mediators of morpholino oligonucleotide uptake in cells. A recent report demonstrated triplex formation by a morpholino oligonucleotide and, because of the non-ionic backbone, these studies showed that the morpholino oligonucleotide was capable of triplex formation in the absence of magnesium.

[0024] In further embodiments that the linkage between the residues in a backbone do not include a phosphorus atom, such as a linkage that is formed by short chain alkyl or cycloalkyl internucleoside linkages, mixed heteroatom and alkyl or cycloalkyl internucleoside linkages, or one or more short chain heteroatomic or heterocyclic internucleoside linkages.

[0025] Examples of nucleotide analogue or equivalent comprises a Peptide Nucleic Acid (PNA), having a modified polyamide backbone (Nielsen, et al. (1991) Science 254, 1497-1500). PNA-based molecules are true mimics of DNA molecules in terms of base-pair recognition. The backbone of the PNA is composed of N-(2-aminoethyl)-glycine units linked by peptide bonds, wherein the nucleobases are linked to the backbone by methylene carbonyl bonds. An alternative backbone comprises a one-carbon extended pyrrolidine PNA monomer (Govindaraju and Kumar (2005) Chem. Commun, 495-497). Since the backbone of a PNA molecule contains no charged phosphate groups, PNA-RNA hybrids are usually more stable than RNA-RNA or RNA-DNA hybrids, respectively (Egholm et al (1993)Nature 365, 566-568). In certain embodiments the backbone comprises a morpholino nucleotide analog or equivalent, in which the ribose or deoxyribose sugar is replaced by a 6-membered morpholino ring. In certain embodiments the nucleotide analog or equivalent comprises a phosphorodiamidate morpholino oligomer (PMO), in which the ribose or deoxyribose sugar is replaced by a 6-membered morpholino ring, and the anionic phosphodiester linkage between adjacent morpholino rings is replaced by a non-ionic phosphorodiamidate linkage.

[0026] In yet a further embodiment, a nucleotide analogue or equivalent of the invention comprises a substitution of one of the non-bridging oxygens in the phosphodiester linkage. This modification slightly destabilizes base-pairing but adds significant resistance to nuclease degradation. A preferred nucleotide analogue or equivalent comprises phosphorothioate, chiral phosphorothioate, phosphorodithioate, phosphotriester, aminoalkylphosphotriester, H-phosphonate, methyl and other alkyl phosphonate including 3′-alkylene phosphonate, 5′-alkylene phosphonate and chiral phosphonate, phosphinate, phosphoramidate including 3′-amino phosphoramidate and aminoalkylphosphoramidate, thionophosphoramidate, thionoalkylphosphonate, thionoalkylphosphotriester, selenophosphate or boranophosphate.

[0027] In certain embodiments the nucleotide analogue or equivalent of the invention comprises one or more sugar moieties that are mono- or disubstituted at the 2′, 3′ and/or 5′ position such as a —OH; —F; substituted or unsubstituted, linear or branched lower (Cl—C10) alkyl, alkenyl, alkynyl, alkaryl, allyl, or aralkyl, that may be interrupted by one or more heteroatoms; O—, S—, or N-alkyl; O—, S—, or N-alkenyl; O—, S- or N-alkynyl; O—, S—, or N-allyl; O-alkyl-O-alkyl, -methoxy, -aminopropoxy; methoxyethoxy; dimethylaminooxyethoxy; and -dimethylaminoethoxyethoxy.

[0028] The sugar moiety can be a pyranose or derivative thereof, or a deoxypyranose or derivative thereof, preferably ribose or derivative thereof, or deoxyribose or derivative of. A preferred derivatized sugar moiety comprises a Locked Nucleic Acid (LNA), in which the 2′-carbon atom is linked to the 3′ or 4′ carbon atom of the sugar ring thereby forming a bicyclic sugar moiety. A preferred LNA comprises 2′-0, 4′—C-ethylene-bridged nucleic acid (Morita et al. 2001. Nucleic Acid Res Supplement No. 1: 241-242). These substitutions render the nucleotide analogue or equivalent RNase H and nuclease resistant and increase the affinity for the target RNA.

[0029] In another embodiment, a nucleotide analogue or equivalent of the invention comprises one or more base modifications or substitutions. Modified bases comprise synthetic and natural bases such as inosine, xanthine, hypoxanthine and other -aza, deaza, -hydroxy, -halo, -thio, thiol, -alkyl, -alkenyl, -alkynyl, thioalkyl derivatives of pyrimidine and purine bases that are or will be known in the art.

[0030] It is understood by a skilled person that it is not necessary for all positions in an antisense oligonucleotide to be modified uniformly. In addition, more than one of the aforementioned analogues or equivalents may be incorporated in a single antisense oligonucleotide or even at a single position within an antisense oligonucleotide. In certain embodiments, an antisense oligonucleotide of the invention has at least two different types of analogues or equivalents.

[0031] Accordingly, in preferred embodiments the antisense oligonucleotide for skipping exon of 68 according to the invention comprises a 2′-0 alkyl phosphorothioate antisense oligonucleotide, such as 2′-O-methyl modified ribose (RNA), 2′-O-ethyl modified ribose, 2′-O-methoxyethyl modified ribose, 2′-O-propyl modified ribose, and/or substituted derivatives of these modifications such as halogenated derivatives.

[0032] In certain embodiments, an ASO for skipping of exon 68 according to the invention comprises or consists of SEQ ID NO: 8 and comprises a 2′-O-methoxyethyl modified ribose and a phosphorothioate backbone.

[0033] In certain embodiments, an ASO for skipping of exon 68 according to the invention comprises or consists of SEQ ID NO: 9 and comprises a 2′-O-methoxyethyl modified ribose and a phosphorothioate backbone.

[0034] It will also be understood by the skilled person that different antisense oligonucleotides can be combined for the skipping of exon 68. Accordingly, the invention provides for a set of antisense oligonucleotide for the skipping of exon 68 comprising at least two antisense oligonucleotides as defined herein.

[0035] The antisense oligonucleotide for skipping of exon 68 according to the invention, preferably, may be delivered as such. However, antisense oligonucleotide for skipping of exon 68 may also be encoded by the viral vector. Typically, this is in the form of an RNA transcript that comprises the sequence of an oligonucleotide according to the invention in a part of the transcript. Accordingly, in a further aspect, the invention provides for a viral vector expressing the antisense oligonucleotide for skipping of exon 68 as defined herein when placed under conditions conducive to expression of the molecule.

[0036] Viral vectors as used herein include but are not limited to lentiviral vector systems and adenoviral vector systems.

[0037] A preferred expression system for an ASO for skipping of exon 68 according to the invention is an adenovirus associated virus (AAV)-based vector. Single chain and double chain AAV-based vectors have been developed that can be used for prolonged expression of antisense nucleotide sequences for highly efficient degradation of transcripts. A preferred AAV-based vector, for instance, comprises an expression cassette that is driven by an RNA polymerase III-promoter (Pol III) or an RNA polymerase II promoter (Pol II). A preferred RNA promoter is, for example, a Pol III U6 RNA promoter, or a Pol II U7 RNA promoter.

[0038] The invention accordingly provides for a viral-based vector, comprising a Pol II or a Pol III promoter driven expression cassette for expression of an antisense oligonucleotide for skipping exon 68 of USH2A.

[0039] An AAV vector according to the invention is a recombinant AAV vector and refers to an AAV vector comprising part of an AAV genome comprising an encoded ASO for the skipping of exon 68 of USH2A according to the invention encapsulated in a protein shell of capsid protein derived from an AAV serotype as depicted elsewhere herein. Part of an AAV genome may contain the inverted terminal repeats (ITR) derived from an adeno-associated virus serotype, such as AAV1, AAV2, AAV3, AAV4, AAV5, AAV8, AAV9 and others. A protein shell comprised of capsid protein may be derived from an AAV serotype such as AAV1, 2, 3, 4, 5, 8, 9 and others. A protein shell may also be named a capsid protein shell. AAV vector may have one or preferably all wild type AAV genes deleted, but may still comprise functional ITR nucleic acid sequences. Functional ITR sequences are necessary for the replication, rescue and packaging of AAV virions. The ITR sequences may be wild type sequences or may have at least 80%, 85%, 90%, 95, or 100% sequence identity with wild type sequences or may be altered by for example in insertion, mutation, deletion or substitution of nucleotides, as long as they remain functional. In this context, functionality refers to the ability to direct packaging of the genome into the capsid shell and then allow for expression in the host cell to be infected or target cell. In the context of the invention a capsid protein shell may be of a different serotype than the AAV vector genome ITR. An AAV vector according to present the invention may thus be composed of a capsid protein shell, i.e. the icosahedral capsid, which comprises capsid proteins (VP1, VP2, and/or VP3) of one AAV serotype, e.g. AAV serotype 2, whereas the ITRs sequences contained in that AAV5 vector may be any of the AAV serotypes described above, including an AAV2 vector. An “AAV2 vector” thus comprises a capsid protein shell of AAV serotype 2, while e.g. an “AAV5 vector” comprises a capsid protein shell of AAV serotype 5, whereby either may encapsidate any AAV vector genome ITR according to the invention.

[0040] Preferably, a recombinant AAV vector according to the invention comprises a capsid protein shell of AAV serotype 2, 5, 8 or AAV serotype 9 wherein the AAV genome or ITRs present in said AAV vector are derived from AAV serotype 2, 5, 8 or AAV serotype 9; such AAV vector is referred to as an AAV2/2, AAV 2/5, AAV2/8, AAV2/9, AAV5/2, AAV5/5, AAV5/8, AAV 5/9, AAV8/2, AAV 8/5, AAV8/8, AAV8/9, AAV9/2, AAV9/5, AAV9/8, or an AAV9/9 vector.

[0041] More preferably, a recombinant AAV vector according to the invention comprises a capsid protein shell of AAV serotype 2 and the AAV genome or ITRs present in said vector are derived from AAV serotype 5; such vector is referred to as an AAV 2/5 vector.

[0042] More preferably, a recombinant AAV vector according to the invention comprises a capsid protein shell of AAV serotype 2 and the AAV genome or ITRs present in said vector are derived from AAV serotype 8; such vector is referred to as an AAV 2/8 vector.

[0043] More preferably, a recombinant AAV vector according to the invention comprises a capsid protein shell of AAV serotype 2 and the AAV genome or ITRs present in said vector are derived from AAV serotype 9; such vector is referred to as an AAV 2/9 vector.

[0044] More preferably, a recombinant AAV vector according to the invention comprises a capsid protein shell of AAV serotype 2 and the AAV genome or ITRs present in said vector are derived from AAV serotype 2; such vector is referred to as an AAV 2/2 vector.

[0045] A nucleic acid molecule encoding an ASO according to the invention represented by a nucleic acid sequence of choice is preferably inserted between the AAV genome or ITR sequences as identified above, for example an expression construct comprising an expression regulatory element operably linked to a coding sequence and a 3′ termination sequence.

[0046] “AAV helper functions” generally refers to the corresponding AAV functions required for AAV replication and packaging supplied to the AAV vector in trans. AAV helper functions complement the AAV functions which are missing in the AAV vector, but they lack AAV ITRs (which are provided by the AAV vector genome). AAV helper functions include the two major ORFs of AAV, namely the rep coding region and the cap coding region or functional substantially identical sequences thereof. Rep and Cap regions are well known in the art, see e.g. (Chiorini et al., 1999) or U.S. Pat. No. 5,139,941, incorporated herein by reference. The AAV helper functions can be supplied on an AAV helper construct, which may be a plasmid. Introduction of the helper construct into the host cell can occur e.g. by transformation, transfection, or transduction prior to or concurrently with the introduction of the AAV genome present in the AAV vector as identified herein. The AAV helper constructs according to the invention may thus be chosen such that they produce the desired combination of serotypes for the AAV vector's capsid protein shell on the one hand and for the AAV genome present in said AAV vector replication and packaging on the other hand.

[0047] “AAV helper virus” provides additional functions required for AAV replication and packaging. Suitable AAV helper viruses include adenoviruses, herpes simplex viruses (such as HSV types 1 and 2) and vaccinia viruses. The additional functions provided by the helper virus can also be introduced into the host cell via vectors, as described in U.S. Pat. No. 6,531,456 incorporated herein by reference.

[0048] Preferably, an AAV genome as present in a recombinant AAV vector according to the invention does not comprise any nucleotide sequences encoding viral proteins, such as the rep (replication) or cap (capsid) genes of AAV. An AAV genome may further comprise a marker or reporter gene, such as a gene for example encoding an antibiotic resistance gene, a fluorescent protein (e.g. gfp) or a gene encoding a chemically, enzymatically or otherwise detectable and/or selectable product (e.g. lacZ, aph, etc.) known in the art.

[0049] A preferred AAV vector according to the invention is an AAV vector, preferably an AAV2/5, AAV2/8, AAV2/9 or AAV2/2 vector, carrying an ASO for skipping of exon 68 according to the invention that is an ASO that comprises, or preferably consists of, a sequence that is:
[0050] complementary or substantially complementary to a nucleotide sequence consisting of SEQ ID NO 1, preferably wherein the antisense oligonucleotide binds and/or is complementary to SEQ ID NO: 2 or SEQ ID NO: 3, preferably to SEQ ID NO: 4 or SEQ ID NO:5, preferably to SEQ ID NO: 6, SEQ ID NO:7 or a part thereof.

[0051] Even more preferably, the ASO comprises or consists of a polynucleotide with a nucleotide sequence selected from the group consisting of SEQ ID NO: 8 and SEQ ID NO: 9.

[0052] Improvements in means for providing an individual or a cell, tissue, organ of said individual with an antisense oligonucleotide for skipping of exon 68 according to the invention, are anticipated considering the progress that has already thus far been achieved. Such future improvements may of course be incorporated to achieve the mentioned effect on restructuring of mRNA using a method according to the invention.

[0053] Alternatively, a preferred delivery method for an antisense oligonucleotide for skipping of exon 68 as described herein or a plasmid for expression of such ASO is a viral vector or are nanoparticles. In certain embodiments, the preferred delivery method for an ASO as described herein is by use of slow-release or sustained release capsules. In certain embodiments, the preferred delivery method for an ASO as described herein is by use of hydrogels (such as described in WO1993/01286).

[0054] Alternatively, a preferred delivery method for an antisense oligonucleotide or a plasmid for antisense oligonucleotide expression is a viral vector or nanoparticles. Preferably viral vectors or nanoparticles are delivered to retina or inner ear cells. Such delivery to retina or inner ear cells or other relevant cells may be in vivo, in vitro or ex vivo.

[0055] Alternatively, a plasmid can be provided by transfection using known transfection agentia. For intravenous, subcutaneous, intramuscular, intrathecal and/or intraventricular administration it is preferred that the solution is a physiological salt solution. Particularly preferred in the invention is the use of an excipient or transfection agentia that will aid in delivery of each of the constituents as defined herein to a cell and/or into a cell, preferably a retina cell. Preferred are excipients or transfection agentia capable of forming complexes, nanoparticles, micelles, vesicles and/or liposomes that deliver each constituent as defined herein, complexed or trapped in a vesicle or liposome through a cell membrane. Many of these excipients are known in the art. Suitable excipients or transfection agentia comprise polyethylenimine (PEI; ExGen500 (MBI Fermentas)), LipofectAMINE™ 2000 (Invitrogen) or derivatives thereof, or similar cationic polymers, including polypropyleneimine or polyethylenimine copolymers (PECs) and derivatives, synthetic amphiphils (SAINT-18), Lipofectin™, DOTAP and/or viral capsid proteins that are capable of self assembly into particles that can deliver each constitutent as defined herein to a cell, preferably a retina cell. Such excipients have been shown to efficiently deliver an oligonucleotide such as antisense nucleic acids to a wide variety of cultured cells, including retina cells. Their high transfection potential is combined with an excepted low to moderate toxicity in terms of overall cell survival. The ease of structural modification can be used to allow further modifications and the analysis of their further (in vivo) nucleic acid transfer characteristics and toxicity.

[0056] Lipofectin represents an example of a liposomal transfection agent. It consists of two lipid components, a cationic lipid N-[1-(2,3 dioleoyloxy)propyl]-N, N, N-trimethylammonium chloride (DOTMA) (cp. DOTAP which is the methylsulfate salt) and a neutral lipid dioleoylphosphatidylethanolamine (DOPE). The neutral component mediates the intracellular release. Another group of delivery systems are polymeric nanoparticles.

[0057] Polycations such as diethylaminoethylaminoethyl (DEAE)-dextran, which are well known as DNA transfection reagent can be combined with butylcyanoacrylate (PBCA) and hexylcyanoacrylate (PHCA) to formulate cationic nanoparticles that can deliver each constituent as defined herein, preferably an oligonucleotide, across cell membranes into cells.

[0058] In addition to these common nanoparticle materials, the cationic peptide protamine offers an alternative approach to formulate an oligonucleotide with colloids. This colloidal nanoparticle system can form so called proticles, which can be prepared by a simple self-assembly process to package and mediate intracellular release of an oligonucleotide. The skilled person may select and adapt any of the above or other commercially available alternative excipients and delivery systems to package and deliver an exon skipping molecule for use in the current invention to deliver it for the prevention, treatment or delay of a USH2A-related disease or condition. “Prevention, treatment or delay of a USH2A-related disease or condition” is herein preferably defined as preventing, halting, ceasing the progression of, or reversing partial or complete visual impairment or blindness, as well as preventing, halting, ceasing the progression of or reversing partial or complete auditory impairment or deafness that is caused by a genetic defect in the USH2A gene.

[0059] An antisense oligonucleotide can be linked to a moiety that enhances uptake of the antisense oligonucleotide in cells, preferably retina cells. Examples of such moieties are cholesterols, carbohydrates, vitamins, biotin, lipids, phospholipids, cell-penetrating peptides including but not limited to antennapedia, TAT, transportan and positively charged amino acids such as oligoarginine, poly-arginine, oligolysine or polylysine, antigen-binding domains such as provided by an antibody, a Fab fragment of an antibody, or a single chain antigen binding domain such as a cameloid single domain antigen-binding domain.

[0060] In addition, an antisense oligonucleotide for skipping of exon 68 according to the invention could be covalently or non-covalently linked to a targeting ligand specifically designed to facilitate the uptake into the cell, cytoplasm and/or its nucleus. Such ligand could comprise (i) a compound (including but not limited to peptide(-like) structures) recognising cell, tissue or organ specific elements facilitating cellular uptake and/or (ii) a chemical compound able to facilitate the uptake in to cells and/or the intracellular release of an oligonucleotide from vesicles, e.g. endosomes or lysosomes.

[0061] Therefore, in a preferred embodiment, the antisense oligonucleotide for skipping of exon 68 according to the invention according to the invention is formulated in a composition or a medicament or a composition, which is provided with at least an excipient and/or a targeting ligand for delivery and/or a delivery device thereof to a cell and/or enhancing its intracellular delivery.

[0062] It is to be understood that if a composition comprises an additional constituent such as an adjunct compound as later defined herein, each constituent of the composition may not be formulated in one single combination or composition or preparation. Depending on their identity, the skilled person will know which type of formulation is the most appropriate for each constituent as defined herein. In a preferred embodiment, the invention provides a composition or a preparation which is in the form of a kit of parts comprising an exon skipping molecule according to the invention and a further adjunct compound as later defined herein.

[0063] If required, the antisense oligonucleotide for skipping of exon 68 according to the invention or a vector, preferably a viral vector, the antisense oligonucleotide for skipping of exon 68 according to the invention can be incorporated into a pharmaceutically active mixture by adding a pharmaceutically acceptable carrier.

[0064] Accordingly, the invention also provides a composition, preferably a pharmaceutical composition, comprising the antisense oligonucleotide for skipping of exon 68 according to the invention, or a viral vector according to the invention and a pharmaceutically acceptable excipient. Such composition may comprise a single antisense oligonucleotides or viral vector according to the invention, but may also comprise multiple, distinct antisense oligonucleotides or viral vectors according to the invention. Such a pharmaceutical composition may comprise any pharmaceutically acceptable excipient, including a carrier, filler, preservative, adjuvant, solubilizer and/or diluent. Such pharmaceutically acceptable carrier, filler, preservative, adjuvant, solubilizer and/or diluent may for instance be found in Remington, 2000. Each feature of said composition has earlier been defined herein.

[0065] A preferred route of administration is through intra-vitreal injection of an aqueous solution or specially adapted formulation for intraocular administration. EP2425 814 discloses an oil in water emulsion especially adapted for intraocular (intravitreal) administration of peptide or nucleic acid drugs. This emulsion is less dense than the vitreous fluid, so that the emulsion floats on top of the vitreous, avoiding that the injected drug impairs vision.

[0066] Another preferred route of administration is administration into the inner ear (intratympanic). More preferred is administration into the cochlea and/or into the vestibular organ.

[0067] Dose ranges of an ASO, composition, compound or adjunct compound according to the invention are preferably designed on the basis of rising dose studies in clinical trials (in vivo use) for which rigorous protocol requirements exist. An ASO according to the invention may be used at a dose which is ranged from 0.01 and 30 mg/kg, preferably from 0.05 and 30 mg/kg.

[0068] In certain embodiments, the pharmaceutical composition as described herein is administered through intravitreal or intratympanic administration. For delivery to the brain or pineal gland intrathecal injections or systemic delivery is also considered If multiple distinct antisense oligonucleotides for skipping exon 68 according to the invention are used, concentration or dose defined herein may refer to the total concentration or dose of all oligonucleotides used or the concentration or dose of each exon skipping molecule used or added. Therefore in one embodiment, there is provided a composition wherein each or the total amount of antisense oligonucleotides according to the invention used is dosed in an amount ranged from 0.01 and 30 mg/kg, preferably from 0.05 and 30 mg/kg. A suitable intravitreal dose would be between 0.05 mg and 5 mg, preferably between 0.1 and 1 mg per eye, such as about per eye: 0.1, 0.2, 0.3, 0.4, 0.5, 0.6, 0.7, 0.8, 0.9 or 1.0 mg. A suitable in intratympanic dose would be between 0.1 mg and 30 mg, preferably between 0.1 and 15 mg per ear, such as about: 0.1, 0.2, 0.3, 0.4, 0.5, 0.6, 0.7, 0.8, 0.9, 1.0, 2.0, 3.0, 4.0, 5.0, 6.0, 7.0, 8.0, 9.0, 10.0, 11.0, 12.0, 13.0, 14.0, or 15.0 mg per ear.

[0069] Preferably, the antisense oligonucleotide for skipping of exon 68 according to the invention, the vector as described herein and the pharmaceutical composition as described herein is for use in the treatment of a USH2A-related disease or condition of an individual. In all embodiments of the invention, the term “treatment” is understood to include the prevention and/or delay of the USH2A-related disease or condition. An individual, which may be treated using antisense oligonucleotide for skipping of exon 68 according to the invention, the vector as described herein and the pharmaceutical composition as described herein may already have been diagnosed as having a USH2A-related disease or condition.

[0070] Alternatively, an individual which may be treated using an antisense oligonucleotide for skipping of exon 68 according to the invention may not have yet been diagnosed as having a USH2A-related disease or condition but may be an individual having an increased risk of developing a USH2A-related disease or condition in the future given his or her genetic background. A preferred individual is a human being. In a preferred embodiment the USH2A-related disease or condition is Usher Syndrome type 2.

[0071] Accordingly, the invention further provides antisense oligonucleotide for skipping exons of exon 68 according to the invention, or a viral vector according to the invention, or a composition according to the invention for use as a medicament, for treating a USH2A-related disease or condition requiring modulating splicing of USH2A and for use as a medicament for the prevention, treatment or delay of a USH2A-related disease or condition. A preferred USH2A-related disease or condition is Usher Syndrome type 2.

[0072] The invention further provides the use of an antisense oligonucleotide for skipping of exon 68 according to the invention, or of a viral vector according to the invention, or a composition according to the invention for the treatment of a USH2A-related disease or condition requiring modulating splicing of USH2A. In a preferred embodiment the USH2A-related disease or condition is USH2A-associated Retinitis pigmentosa (RP).

[0073] The invention further provides the use of an antisense oligonucleotide for skipping of exon 68 according to the invention, or of a viral vector according to the invention, or a composition according to the invention for the preparation of a medicament, for the preparation of a medicament for treating a USH2A-related disease or condition requiring modulating splicing of USH2A and for the preparation of a medicament for the prevention, treatment or delay of a USH2A-related disease or condition. A preferred USH2A-related disease or condition is Usher Syndrome type 2. Therefore in a further aspect, there is provided the use of an antisense oligonucleotide for skipping of exon 68, viral vector or composition as defined herein for the preparation of a medicament, for the preparation of a medicament for treating a condition requiring modulating splicing of USH2A and for the preparation of a medicament for the prevention, treatment or delay of a USH2A-related disease or condition. A preferred USH2A-related disease or condition is USH2A-associated Retinitis pigmentosa (RP).

[0074] A treatment in a use or in a method according to the invention is at least once, lasts one week, one month, several months, one year, 2, 3, 4, 5, 6 years or longer, such as lifelong. Each antisense oligonucleotide for skipping of exon 68 or equivalent thereof as defined herein for use according to the invention may be suitable for direct administration to a cell, tissue and/or an organ in vivo of individuals already affected or at risk of developing USH2A-related disease or condition, and may be administered directly in vivo, ex vivo or in vitro. The frequency of administration of an oligonucleotide, composition, compound or adjunct compound of the invention may depend on several parameters such as the severity of the disease, the age of the patient, the mutation of the patient, the number of antisense oligonucleotides (i.e. dose), the formulation of antisense oligonucleotides, the route of administration and so forth. The frequency may vary between daily, weekly, at least once in two weeks, or three weeks or four weeks or five weeks or a longer time period.

[0075] Dose ranges of oligonucleotides according to the invention are preferably designed on the basis of rising dose studies in clinical trials (in vivo use) for which rigorous protocol requirements exist. An oligonucleotide as defined herein, may be used at a dose which is ranged from 0.01 and 20 mg/kg, preferably from 0.05 and 20 mg/kg. A suitable intravitreal or intratympanic dose would be between 0.05 mg and 5 mg, preferably between 0.1 and 1 mg per eye or per ear, such as about per eye: 0.1, 0.2, 0.3, 0.4, 0.5, 0.6, 0.7, 0.8, 0.9 or 1.0 mg.

[0076] In a preferred embodiment, a concentration of an oligonucleotide as defined herein, which is ranged from 0.1 nM and 1 μM is used. Preferably, this range is for in vitro use in a cellular model such as retina or cochlear cells or retinal or cochlear tissue. More preferably, the concentration used is ranged from 1 to 400 nM, even more preferably from 10 to 200 nM, even more preferably from 50 to 100 nM. If several oligonucleotides are used, this concentration or dose may refer to the total concentration or dose of oligonucleotides or the concentration or dose of each oligonucleotide added.

[0077] In a preferred embodiment, a viral vector, preferably an AAV vector as described earlier herein, as delivery vehicle for a oligonucleotide according to the invention, is administered in a dose ranging from 1×10⁹-1×10¹⁷ virus particles per injection, more preferably from 1×10¹⁰-1×10¹² virus particles per injection.

[0078] The ranges of concentration or dose of oligonucleotide(s) as given above are preferred concentrations or doses for in vivo, in vitro or ex vivo uses. The skilled person will understand that depending on the oligonucleotide(s) used, the target cell to be treated, the gene target and its expression levels, the medium used and the transfection and incubation conditions, the concentration or dose of oligonucleotide(s) used may further vary and may need to be optimized any further.

[0079] The antisense oligonucleotide for skipping of exon 68 according to the invention, or a viral vector according to the invention, or a composition according to the invention for use according to the invention may be suitable for administration to a cell, tissue and/or an organ in vivo of individuals already affected or at risk of developing a USH2A-related disease or condition, and may be administered in vivo, ex vivo or in vitro. The antisense oligonucleotide for skipping of exon 68 according to the invention, or a viral vector according to the invention, or a composition according to the invention may be directly or indirectly administered to a cell, tissue and/or an organ in vivo of an individual already affected by or at risk of developing a USH2A-related disease or condition, and may be administered directly or indirectly in vivo, ex vivo or in vitro. As Usher Syndrome type 2 has a pronounced phenotype in retina and inner ear cells, it is preferred that said cells are retina or inner ear cells, it is further preferred that said tissue is the retina or the inner ear and/or it is further preferred that said organ comprises or consists of the eye or the ear.

[0080] The invention further provides a method for modulating splicing of USH2A in a cell comprising contacting the cell, preferably a retina cell, with an antisense oligonucleotide for skipping of exon 68 according to the invention, or a viral vector according to the invention, or a composition according to the invention. The features of this aspect are preferably those defined earlier herein. Contacting the cell with an exon skipping molecule according to the invention, or a viral vector according to the invention, or a composition according to the invention may be performed by any method known by the person skilled in the art. Use of the methods for delivery of antisense oligonucleotide for skipping of exon 68, viral vectors and compositions described herein is included. Contacting may be directly or indirectly and may be in vivo, ex vivo or in vitro.

[0081] The invention further provides a method for the treatment of a USH2A-related disease or condition requiring modulating splicing of USH2A of an individual in need thereof, said method comprising contacting a cell, preferably a retina cell or cochlear cell, of said individual with an antisense oligonucleotide for skipping of exon 68 according to the invention, or a viral vector according to the invention, or a composition according to the invention. The features of this aspect are preferably those defined earlier herein. Contacting the cell, preferably a retina cell or a cochlear cell with an oligonucleotide according to the invention, or a viral vector according to the invention, or a composition according to the invention may be performed by any method known by the person skilled in the art. Use of the methods for delivery of molecules, viral vectors and compositions described herein is included. Contacting may be directly or indirectly and may be in vivo, ex vivo or in vitro.

[0082] In yet another aspect, the invention provides for the use of an antisense oligonucleotide for skipping of exon 68 according to the invention, or a viral vector according to the invention, or a composition according to the invention for treating an USH2A-related disease or a condition requiring modulating splicing of USH2A.

[0083] Unless otherwise indicated each embodiment as described herein may be combined with another embodiment as described herein.

[0084] In this document and in its claims, the verb “to comprise” and its conjugations is used in its non-limiting sense to mean that items following the word are included, but items not specifically mentioned are not excluded. In addition, reference to an element by the indefinite article “a” or “an” does not exclude the possibility that more than one of the element is present, unless the context clearly requires that there be one and only one of the elements. The indefinite article “a” or “an” thus usually means “at least one”.

[0085] The word “about” or “approximately” when used in association with a numerical value (e.g. about 10) preferably means that the value may be the given value (of 10) more or less 5% of the value.

[0086] The sequence information as provided herein should not be so narrowly construed as to require inclusion of erroneously identified bases. The skilled person is capable of identifying such erroneously identified bases and knows how to correct for such errors.

[0087] All patent and literature references cited in the present specification are hereby incorporated by reference in their entirety.

### DESCRIPTION OF THE FIGURES

[0088] FIG. 1: Overview of target sites for the designed antisense oligonucleotide (ASO). ASOs that specifically induce skipping of USH2A exon 68 were designed. ASOs target the intron-exon boundaries and numerous known exonic splice enhancer (ESE) motifs. Splicing Enhancer Matrices and Splicing Silencer Matrices were assessed and visualized using the ‘Human Splicing Finder’ website (www.umd.be/HSF3/).

[0089] FIG. 2: Generation of the minigene splice vectors. The genomic region containing USH2A exons 68-69 and flanking sequences were cloned into the pCl-Neo Rho destination vector (pDEST_pCI-Neo Rho). This resulted in a minigene splice vector which contains the fragments of interest flanked by two rhodopsin exons under the control of a CMV promotor. Mutagenesis PCR was performed to introduce the different patient mutations in USH2A exon 68.

[0090] FIG. 3: In silico modeling of usherin protein domain architecture after exon 68 skipping. (A) Schematic representation of the domain architecture of the large protein isoform of human and zebrafish usherin. The large protein isoforms of human and zebrafish usherin are comprised of the same repetitive protein domain architecture that includes a signal peptide, a laminin G-like domain (LamG-like), a laminin N-terminal domain (LamNT), 10 EGF-like motifs, four fibronectin type III (FN3) domains, two laminin G domains (LamG), 28 additional FN3 domains, one transmembrane domain and a short intracellular region with a C-terminal class I PDZ binding motif. Skipping of USH2A exon 68 has no impact on the usherin protein domain architecture. The region that is lost in human and zebrafish usherin is indicated with a dashed box. Numbers indicate amino acids.

[0091] FIG. 4: Design and characterization of the ush2a^{Δexon68} zebrafish line. (A) Schematic representation of the exon excision approach. Sanger sequencing confirmed the presence of the anticipated excision in injected embryos (1 day post fertilization (dpf)). (B) RT-PCR analysis followed by Sanger sequencing revealed the absence of exon 68 from ush2a transcripts of ush2a^{Δexon68} larvae (5 days post fertilization (dpf)).

[0092] FIG. 5: Visualization of usherin proteins on retinal sections of wild-type, ush2a^{exon68KO} and ush2a^{Δexon68} zebrafish. (A) Retinal cryosections of wild-type, ush2a^{exon68KO} and ush2a^{Δexon68} larvae (5 days post fertilization (dpf)) labeled with antibodies directed against usherin and centrin. Nuclei are counterstained with DAPI. No usherin signal was detected in ush2a^{exon68KO} zebrafish retinas, whereas in the retinas of wild-type and ush2a^{Δexon68} larvae usherin was present at the photoreceptor periciliary region, in close proximity to centrin. Scale bar: 10 μm. OS: outer segment, CC: connecting cilium, IS: inner segment, ONL: outer nuclear layer. (B) Quantification of anti-usherin signal intensity at the periciliary region. Individual data points represent the mean fluorescence intensity of anti-usherin signals at the periciliary region of all photoreceptors of a single, central section of both larval zebrafish eyes. Horizonal bars depict the mean signal intensity within a genotype (n=9-13 fish). Data were analyzed using one-way ANOVA followed by Tukey's multiple comparison test. **** P 0.0001.

[0093] FIG. 6: Immunohistochemistry on retinal sections of wild-type, ush2a^{exon68KO} and ush2a^{Δexon68} zebrafish. (A) Retinal cryosections of 6 days post fertilization (dpf) were analyzed for rhodopsin localization. Nuclei were counterstained with DAPI. In the retinas of wild-type and ush2a^{Δexon68} larvae rhodopsin was predominantly present in the photoreceptor outer segments, whereas in ush2a^{exon68KO} zebrafish retinas rhodopsin signal was also detected in the photoreceptor cell body as indicated by arrowheads. Scale bar: 10 μm. ROS: rod outer segment, ONL: outer nuclear layer, INL: inner nuclear layer. (B) Scatterplot of detected photoreceptor cells with aberrant rhodopsin localization in 6 dpf zebrafish obtained by manual counting and plotted as mean of both eyes per zebrafish (n=11-13). Horizonal bars depict the mean signal intensity within a genotype. The amount of cells with aberrant rhodopsin localization is significantly lower in wild-type and ush2a^{Δexon68} retinas as compared to ush2a^{rmc1} retinas. Data were analyzed using one-way ANOVA followed by Tukey's multiple comparison test. **** P 0.0001.

[0094] FIG. 7: Normalized maximum ERG b-wave amplitudes recorded in wild-type, ush2a^{exon68KO} and ush2a^{Δexon68} zebrafish. Maximum b-wave amplitudes recorded in 5 days post fertilization (dpf) ush2a^{exon68KO} larvae are significantly reduced as compared to ERG traces from age- and strain-matched WT controls. Maximum b-wave amplitudes recorded in ush2a^{Δexon68} larvae are significantly improved as compared to ERG traces from ush2a^{exon68KO} and do not significantly differ from WTs (p>0.99). Horizonal bars depict the mean signal intensity within a genotype. *p<0.05, **p<0.01, Kruskal-Wallis test followed by Dunn's nonparametric post-test.

[0095] FIG. 8: Identification of potent ASOs using a minigene splice assay. (A) HEK293T cells were co-transfected with the minigene splice vector containing USH2A exon 68 and either ASO_68_1 or ASO_68_2. The upper amplicon represents the transcript containing USH2A exon 68, whereas the lower amplicon represents the transcript lacking the targeted exon. (B) HEK293T cells are co-transfected with the USH2A exon 68 minigene vector and different concentrations of ASO targeting USH2A exon 68, resulting in an increase in exon skipped transcripts with increasing concentrations of ASO. (C) HEK293T cells are co-transfected with the USH2A exon 68 minigene vectors containing the c.14792-2A>G mutation and ASO_68_2 in a 200 nM concentration, resulting in skipping of USH2A exon 68. The c.14792-2A>G mutation affects the canonical splice acceptor site of exon 68, resulting in two alternatively spliced amplicons: one containing a 62 bp inclusion of intron 67 and one containing a 8 bp deletion of exon 68. (D) HEK293T cells are co-transfected with the USH2A exons 68 minigene vector containing the c.14803C>T mutation and ASO_68_2 in a 200 nM concentration, resulting in skipping of USH2A exon 68. GAPDH amplification is shown as a loading control. ASO: antisense oligonucleotide; mmASO: mismatch ASO; PCR(—): negative PCR control.

[0096] FIG. 9: ASO treatment induced a concentration-dependent increase of USH2A exon 68 skipping in iPSC-derived retinal organoids from a patient (USH2A^{c. 14792-2A>G/c.4174G>T}). (A) 3D retinal organoids compound heterozygous for the USH2A c.14792-2A>G splice site mutation were treated with different concentrations of ASO targeting USH2A exon 68, once per week for two weeks, which resulted in an increase in exon skipped transcripts with increasing concentrations of ASO. (B) Gene-expression analysis indicates successful differentiation toward retinal organoids. The decrease in NANOG expression is indicative for loss of pluripotency, whereas the increased expression of photoreceptor markers CRX, RCVRN, RHO and NRL is indicative of the successful differentiation toward retinal organoids. Organoids were sampled either prior to ASO treatment (D113) or after ASO treatment (D127). GAPDH amplification is shown as a loading control. ASO: antisense oligonucleotide; PCR(—): negative PCR control.

[0097] FIG. 10: ASO treatment induced a significant increase of USH2A exon 68 skipping in iPSC-derived retinal organoids from a patient (USH2A^{c.14792-2A>G/c.4174G>T}). (A)(B) 3D retinal organoids compound heterozygous for the USH2A c.14792-2A>G splice site mutation were treated with 15 μM ASO targeting USH2A exon 68, twice per week for 4 weeks, in two replicate experiments (A and B). Treatment was started at day 197 and lasted for 28 days and resulted in an increased level of transcripts in which the target exon was skipped. (C and D) Gene-expression analysis indicates successful differentiation toward retinal organoids. The decrease in NANOGexpression is indicative for loss of pluripotency, whereas the increased expression of photoreceptor markers CRX, RCVRN, RHO and NRL is indicative of the successful differentiation toward retinal organoids. Organoids were sampled either prior to ASO treatment (D197) or after ASO treatment (D225). GAPDH amplification is shown as a loading control. ASO: antisense oligonucleotide; PCR(—): negative PCR control. (E) Quantitative analysis of USH2A exon 68 skipping levels by RT-qPCR upon continuous treatment with ASO. After a 28 day-during treatment regime, skipping of exon 68 was significantly increased as compared to the untreated mutant control organoid (****p<0.0001; mean±SD of 3 samples per condition, one-way ANOVA Tukey's multiple comparison test).

[0098] FIG. 11: Visualization of usherin proteins on sections of wild-type and untreated as well as treated patient-derived retinal organoids (USH2A^{c. 147922A>G/c.4174G>T}). (A) Cryosections of 225 day old untreated wild-type, untreated mutant and treated mutant retinal organoids were stained with antibodies directed against usherin and the ciliary rootlet. Nuclei are counterstained with DAPI. No usherin signal was detected in untreated mutant organoids, whereas in wild-type and treated mutant organoids usherin was present at the tip of the ciliary rootlets. (B) Cryosections of 225 day old untreated wild-type, untreated mutant and treated mutant retinal organoids were stained with antibodies directed against usherin and CEP290. Nuclei are counterstained with DAPI. No usherin signal was detected in untreated mutant organoids, whereas in wild-type and treated mutant organoids usherin was present at the photoreceptor periciliary region, in close proximity to CEP290. Scale bar: 10 μm. OS: outer segment, CC: connecting cilium, IS: inner segment, ONL: outer nuclear layer.

### DESCRIPTION OF THE SEQUENCES

TABLE 1
Sequences

| SEQ ID NO: | Name |
|---|---|
| 1 | USH2A genomic DNA wild-type |
| 2 | USH2A exon 68 and flanking genomic sequence |
| 3 | USH2A exon 68 sequence |
| 4 | ASO_68_1 target site and flanking sequences (+10 nt) |
| 5 | ASO_68_2 target site and flanking sequences (+10 nt) |
| 6 | ASO_68_1 target site and flanking sequences (+5 nt) |
| 7 | ASO_68_2 target site and flanking sequences (+5 nt) |
| 8 | ASO_68_1 |
| 9 | ASO_68_2 |
| 10 | mmASO_68_2 |
| 11 | constant oligo |
| 12 | target-specific oligo 5′ ush2a^{Δexon68} |
| 13 | target-specific oligo 3′ ush2a^{Δexon68} |
| 14 | target-specific oligo ush2a^{exon68KO} |
| 15 | ush2a wild-type forward |
| 16 | ush2a wild-type reverse |
| 17 | ush2a Δexon 68 forward |
| 18 | ush2a Δexon 68 reverse |
| 19 | ush2a exon68 KO forward |
| 20 | ush2a exon68 KO reverse |
| 21 | ush2a exon68 KO forward (genescan) |
| 22 | ush2a exon68 KO forward (genescan) |
| 23 | ush2a exon 66-70 forward |
| 24 | ush2a exon 66-70 forward |
| 25 | USH2A intron 67-69 forward |
| 26 | USH2A intron 67-69 forward |
| 27 | Rho exon 3-5 forward |
| 28 | Rho exon 3-5 reverse |
| 29 | USH2A exon 66-70 forward |
| 30 | USH2A exon 66-70 forward |
| 31 | USH2A exon 68 inclusion amplicon forward |
| 32 | USH2A exon 68 inclusion amplicon reverse |
| 33 | USH2A exon 68 deletion amplicon forward |
| 34 | USH2A exon 68 deletion amplicon reverse |
| 35 | USH2A reference amplicon forward |
| 36 | USH2A reference amplicon reverse |
| 37 | NANOG forward |
| 38 | NANOG reverse |
| 39 | SOX2 forward |
| 40 | SOX2 reverse |
| 41 | PAX6 forward (1) |
| 42 | PAX6 reverse (1) |
| 43 | PAX6 forward (2) |
| 44 | PAX6 reverse (2) |
| 45 | CRX forward |
| 46 | CRX reverse |
| 47 | RCVRN forward |
| 48 | RCVRN reverse |
| 49 | RHO forward |
| 50 | RHO reverse |
| 51 | NRL forward |
| 52 | NRL reverse |
| 53 | GAPDH forward |
| 54 | GAPDH reverse |
| 55 | T7 promoter sequence |
| 56 | the 20-base target sequence |
| 57 | GGGCCTCT |

### Examples

[0099] In this study, we further explored exon skipping as a future treatment option for patients with RP caused by mutations in the USH2A gene. Based on in silico protein analysis, and the reported presence of multiple RP-associated protein-truncating mutations, we opted to target exon 68 of human USH2A. Calculations based on available carrier frequencies in the general population for the various reported pathogenic variants in USH2A exon 68 (gnomAD v2.1.1) indicate that ˜12,000 individuals worldwide suffer from USH2A-associated disease caused by (a) variant(s) in this exons. Skipping of this exon is predicted to result in a transcript encoding a shortened usherin protein that does not lack any protein domains. To model the functional consequences of our exon skipping approach, we employed CRISPR/Cas9 and excised the orthologous target exons from the zebrafish genome. This resulted in the ush2a^{Δexon68} zebrafish line in which usherin protein expression was restored in photoreceptors, and in which the localization of rhodopsin to the photoreceptor outer segment was rescued, and in which b-wave amplitudes of the electroretinogram were restored, indicative for a restored visual function. To translate these findings into a future treatment in man, we identified and in vitro validated ASOs with a high exon skipping potential. We furthermore showed that this ASO is able to induce skipping of the exon of interest from USH2A mRNA, and the subsequent restoration of usherin protein expression in matching patient-derived 3D retinal organoids. In conclusion, the obtained in vitro and in vivo data demonstrate ASO-induced USH2A exon 68 skipping to be a highly promising treatment option USH2A-associated RP.

### Materials and Methods

### Zebrafish Ethics, Maintenance and Husbandry

[0100] Animal experiments were conducted in accordance with the Dutch guidelines for the care and use of laboratory animals (Wet op de Dierproeven 1996) and European regulations (Directive 86/609/EEC), as approved by the Dutch Ethics committee of the Central Committee Animal Experimentation (Centrale Commissie Dierproeven [CCD]; Protocol #RU-DEC2016-0091). Wild-type Tupfel Longfin (TL) zebrafish and the previously described ush2a^{rmc1} mutants (c.2337_2342delinsAC; p.Cys780GlnfsTer32) were used (Dona, M., et al., Usherin defects lead to early-onset retinal dysfunction in zebrafish. Experimental eye research, 2018. 173: p. 148-159) Zebrafish were maintained and raised according to standard methods. Both adult and larval zebrafish were kept at a light-dark regime of 14 hours of light and 10 hours of darkness. Adult zebrafish were daily fed twice with Gemma Micro 300 dry pellets (#13177, Zebcare, Nederweert, The Netherlands) at ˜5% body weight and once with artemia. Embryos were obtained from natural spawning.

### Multiple Sequence Alignment

[0101] A multiple sequence alignment of the human usherin protein (ENSP00000305941_3) and zebrafish usherin protein (ENSDARP00000080636_3) was generated using AlignX in the Vector NTI software package (Vector NTI Advance 11).

### CRISPR/Cas9 Genome-Editing Design

[0102] Target sites for single guide RNAs (sgRNAs) to cleave in intron 67, exon 68 or intron 68 of zebrafish ush2a (NCBI accession XM_009293147.3) were identified with the online web tool CHOPCHOP (https://chopchop.cbu.uib.no/). sgRNAs for which no off-target sites were predicted and which had the highest predicted efficiency score were selected for synthesis. Synthesis of sgRNAs was performed as described previously. In brief, templates for in vitro sgRNA transcription were generated by annealing a constant oligonucleotide encoding the reverse complement of the tracrRNA tail to a target-specific oligonucleotide containing the T7 promoter sequence (5′-TAATACGACTCACTATA-3: SEQ ID NO: 55), the 20-base target sequence, and a region (5′-GTTTTAGAGCTAGAAATAGCAAG-3′: SEQ ID NO:56) complementary to the constant oligonucleotide. Phusion™ High-Fidelity DNA Polymerase (#M0530L, New England Biolabs, Ipswich, MA, USA) was used to fill the ssDNA overhang after which the template was purified using the GenElute™ PCR clean-up kit (#NA1020-1KT, Sigma-Aldrich, St. Louis, MO, USA). The template was used for the in vitro transcription of the sgRNAs using the T7 MEGAshortscript™ Kit (#AM1354, Thermo Fisher Scientific, Waltham, MA, USA). Obtained transcripts were purified using the MEGAclear™ Transcription Clean-Up Kit (#AM1908, Thermo Fisher Scientific, Waltham, MA, USA). Oligonucleotides used for sgRNA synthesis are listed in Table 1.

### Microinjections

[0103] For the generation of the ush2a^{Δexon68} zebrafish (deposited as ush2a^{rm}c1 in ZFIN), the 5′ sgRNA, 3′ sgRNA and commercial Alt-R® S.p. Cas9 Nuclease V3 (#1081059, IDT, Newark, NJ, USA) were co-injected. To avoid preferential in vivo binding of Cas9 to either sgRNA, individual sgRNA-Cas9 complexes were prepared and mixed together prior to injection. For this, the individual mixtures were incubated at 37° C. for 5 minutes after which they were combined. The final injection mix contained 80 ng/μl 3′ sgRNA, 80 ng/μl 5′ sgRNA, 800 ng/μl Cas9 protein, 0.2 M KCl and 0.05% phenol red. For the generation of the ush2a^{exon68KO} zebrafish (deposited as ush2a^{rm}c1² in ZFIN), the sgRNA targeting ush2a exon 68 and commercial Alt-R® S.p. Cas9 Nuclease V3 (#1081059, IDT, Newark, NJ, USA) were co-injected. The final injection mix contained 100 ng/μl sgRNA, 800 ng/μl Cas9 protein, 0.2 M KCl and 0.05% phenol red. Injection needles (#TW120F-3, World Precision Instruments, Friedberg, Germany) were prepared using a micropipette puller (Model P-97, Sutter Instrument Company, Novato, CA, USA). Wild-type zebrafish embryos were collected after natural spawning and injected at the single cell stage with 1 nl of injection mixture using a Pneumatic PicoPump (#SYS—PV820, World Precision Instruments, Friedberg, Germany). After injection, embryos were raised at 28.5° C. in E3 embryo medium (5 mM NaCl, 0.17 mM KCl, 0.33 mM CaCl2, and 0.33 mM MgSO4) supplemented with 0.1% (v/v) methylene blue. At 1 day post fertilization (dpf), part of the injected embryos was analyzed for the presence of the anticipated exon deletion or lesion using genomic PCR analysis. The remainder of the injected embryos were raised to adulthood.

### Genotyping

[0104] Genomic DNA was extracted from whole larvae (1 dpf) or caudal fin tissue from adult zebrafish. Tissue was lysed in 25 μl (larvae) or 75 μl (fin tissue) lysis buffer (40 mM NaOH, 0.2 mM EDTA) at 95° C. for 20 minutes. The lysed samples were neutralized with 10% 1M TRIS-HCl (pH 7.5) and diluted 10 times with milli-Q water. 1 μl of diluted sample was used as a template in PCR reactions to amplify the zebrafish ush2a^{Δexon68} allele or the ush2a^{exon68KO allele and the corresponding wild-type zebrafish ush}2a alleles using Taq polymerase (New England Biolabs, M0491 L, Ipswich, MA). All primer sequences are included in the sequence listing and referred to in Table 1. The presence or absence of the zebrafish ush2a^{Δexon68} allele or the ush2a^{exon68KO} was confirmed by Sanger sequencing.

### Antisense Oligonucleotides

[0105] The sequence of USH2A exon 68 and the 50 bp upstream and downstream flanking intronic sequences were analyzed to identify potential ASO target sites as described previously (FIG. 1).

[0106] Briefly, the presence of exonic splice enhancer motifs was assessed using the ‘Human Splicing Finder’ website (www.umd.be/HSF3/; Date accessed: Dec. 16, 2020) and RNA structure and free energy predictions were performed using freely available database tools (www.unafold.org/; rna.urmc.rochester.edu/RNAstructureWeb/index.html). ASOs were designed to have a Tm 48° C., a GC content between 40-60% and a length of 17-23 nt. Subsequently, for each targeted exon, the 3-6 most optimal ASOs were purchased from Eurogentec (Liege, Belgium) containing 2′-O-(2-methoxyethyl) modified ribose groups and a fully phosphorothioated backbone. The matching control ASOs all contain four mismatches relative to the target sequence. All ASOs were dissolved in phosphate-buffered saline (PBS) before use. ASO sequences are listed in Table 2.

TABLE 2
Antisense oligonucleotide
sequences and characteristics.

| RNA | | | GC | SEQ |
|---|---|---|---|---|
| oligo- | Sequence | Length | content | ID |
| nucleotide | (5′→3′) | (nt) | (%) | NO: |
| ASO_68_1 | UACUGAGG | 23 | 52 | 8 |
| | CACUGUGG | | | |
| | GGAGAAA | | | |
| ASO_68_2 | UCAGAAAC | 24 | 46 | 9 |
| | UAACUUUU | | | |
| | GUCCGCCG | | | |
| mmASO_68_2 | UCAUAAAU | 24 | 29 | 10 |
| | UAACUUUU | | | |
| | AUCCACCG | | | |

ASO: antisense oligonucleotide;
mm: mismatch;
nt: nucleotide;
Mismatches with the target sequence are underlined.
All ASO were ordered with 2′-O-(2-methoxyethyl) modified ribose groups and a fully phosphorothioated backbone.

### Minigene Splice Vectors

[0107] The genomic region containing human USH2A exons 68 and 69, together with −700 bp of flanking up- and downstream intronic sequence, was cloned into a pDONR201 vector using Gateway cloning technology. Primer sequences are included in the sequence listing and referred to in Table 1. The complete insert of the donor vector was sequence verified and subsequently cloned into the pCl-Neo-Rho destination vector, which enables the expression of the fragment of interest flanked by two rhodopsin exons. This resulted in a minigene splice vector containing human USH2A exon 68 and 69. Subsequently, mutagenesis PCR was performed to introduce patient-derived mutations in USH2A exon 68 of the minigene splice vector, resulting in two additional mutated minigene splice vectors (FIG. 2).

### Cell Culture

[0108] HEK293T cells were cultured in Dulbecco's modified Eagle's medium (DMEM)(#D0819, Sigma-Aldrich, St. Louis, MO, USA) supplemented with 10% (v/v) fetal bovine serum (#F7524, Sigma-Aldrich, St. Louis, MO, USA), 1% penicillin-streptomycin (#P4333, Sigma-Aldrich, St. Louis, MO, USA) and 1% sodium pyruvate (#S8636, Sigma-Aldrich, St. Louis, MO, USA). Cells were passaged twice per week upon standard trypsinization (#DF0152-15-9, Thermo Fisher Scientific, Waltham, MA, USA).

### Transfection of ASOs and Minigene Splice Vectors in HEK293T Cells

[0109] HEK293T cells were seeded at a concentration of ˜0.2×105 cells per well in a 24-well plate and grown for 24 hours at 37° C. in a total volume of 0.5 ml medium. Cells were (co-)transfected with 500 ng of the minigene splice vector and the indicated amount of ASO, calculated as the final concentration in the culture medium after ASO delivery. The transfection mixture furthermore contained 3 μl Fugene® HD Transfection Reagent (#E2311, Promega, Madison, WI, USA), and was prepared in a final volume of 50 μl Opti-Mem (#31985-047, Gibco Waltham, MA, USA), according to manufacturer's protocol. Two wells per condition were treated. After incubation for 24 hours at 37° C., cells were washed once with PBS and harvested for RNA isolation.

### Culture of Patient-Derived Retinal Organoids

[0110] Following informed consent, a skin biopsy was obtained from a patient compound heterozygous for the c.14792-2A>G splice site mutation (exon 68) and the c.4174G>T mutation (exon 19; p.(G1392*)) in the USH2A gene, and a primary fibroblast cell line was generated as previously described. In essence, four lentiviral vectors containing the pluripotency genes OCT3/4, NANOG, KLF4, and c-MYC were employed for the transduction of fibroblasts. iPSCs were maintained in Essential 8 medium (#A1517001, Life Technologies, Carlsbad CA, USA) and expanded to reach approximately 70% confluence. At this time, defined as day 0 (DO), iPSCs were cultured in Gibco Essential 6TM medium (E6)(#A1516401, Thermo Fisher Scientific, Waltham, MA, USA) for 2 days. The medium was then switched to E6 with N-2 supplement (#A1370701, Thermo Fisher Scientific, Waltham, MA, USA) and changed 3 times per week. On D28, the identified NR-like structures were manually excised using a scalpel and cultured individually, or in pools of 25-30, in ultra-low-attachment 24- or 6-well-plates, respectively. The floating structures were cultured in DMEM/F12+GlutaMAX (#35050061, Gibco, Waltham, MA, USA) supplemented with 1% MEM nonessential amino acids (NEAA; Ser. No. 11/140,050, Gibco, Waltham, MA, USA), 1% GlutaMAX (#35050061, Gibco, Waltham, MA, USA), 2% B27 supplement (#0080085SA, Gibco, Waltham, MA, USA), 10 units/ml Penicillin and 10 mg/ml Streptomycin. During the first week, from D28 to D35 of free-floating culture, the medium was supplemented with 10 ng/ml of animal-free recombinant human basic fibroblast growth factor (FGF-2; #130-104-921, Miltenyi Biotec, Bergisch Gladbach, Germany). FBS was added from D35 onwards. 100 mM of taurine was added to the culture medium at D42. At D65, the B27 supplement was switched to B27-VitA and the medium was supplemented with 1 mM of RA. At D85, the medium was supplemented with 1% N-2. RA was removed from the culture medium at D120. The media was changed 2 times per week. Retinal organoids were routinely monitored using an Olympus CKX53 microscope. Organoids were collected from 2 biological replicate differentiations.

### Transfection of ASOs in Patient-Derived Retinal Organoids

[0111] As a pilot study, patient-derived retinal organoids were cultured for 113 days and subsequently treated once a week for two weeks with 1, 5, 10 or 15 mM ASO. Upon treatment, 50% of culture medium was refreshed with fresh culture medium containing ASO. 7 days after the last treatment, organoids were collected for RNA isolation. In a second experiment, organoids were treated with a total of eight doses of 15 mM ASO, twice per week, from day 197 until day 225. Upon treatment, 50% of culture medium was refreshed with fresh culture medium containing ASO. At day 225, organoids were collected for RNA isolation and immunohistochemistry. All treatments were performed in triplo.

RNA Isolation and cDNA Synthesis

[0112] Total RNA was isolated from transfected HEK293T cells using the Nucleospin RNA II isolation kit (#740955.250, MACHEREY-NAGEL, Duren, Germany), according to manufacturer's protocol, whereas total RNA from zebrafish larvae (5 dpf) was extracted using the RNeasy@Micro kit (#74004, Qiagen, Hilden, Germany). The ReliaPrep™ RNA Tissue Miniprep System (#Z6010, Promega, Madison, WI, USA) was employed to isolate total RNA from pools of 3 patient-derived organoids. For cDNA synthesis from HEK293T RNA, the iScript™ cDNA synthesis kit (#1708891, Bio-Rad, Hercules, CA, USA) was used with 0.5 μg total RNA as input. From zebrafish and organoid RNA, cDNA was synthesized using SuperScript™ IV Reverse Transcriptase (#18090010, Thermo Fisher Scientific, Waltham, MA, USA), combined with an oligo(dT)12-18 primer (#18418012, Thermo Fisher Scientific, Waltham, MA, USA), according to manufacturer's protocol.

### Transcript Analysis

[0113] For the exon skipping experiments using the minigene splice vectors, the target region was amplified from the synthesized cDNA using Taq polymerase (New England Biolabs, M0491L, Ipswich, MA) and a forward primer and reverse primer located in exons 3 and 5 of the human RHO gene, respectively. For the experiments in patient-derived organoids and zebrafish larvae, the target region was amplified from the synthesized human or zebrafish cDNA using Q5® High-Fidelity DNA Polymerase (#M0491L, New England Biolabs, Ipswich, MA, USA). Expression of NANOG, CRX, NRL, OPN1SW, OPN1LW and RHO was investigated by amplifying matching amplicons from the synthesized cDNA using Taq polymerase (New England Biolabs, M0491 L, Ipswich, MA). For the exon skipping experiments in HEK293T cells and WERI-Rb-1 cells and for experiments in patient derived organoids, primers amplifying GAPDH using Taq polymerase (New England Biolabs, M0491 L, Ipswich, MA) were employed as a control. Amplified fragments were separated on a 1% agarose gel and sequence-verified by Sanger sequencing. Quantitative PCR was performed using GoTaq qPCR Master Mix (Promega, Madison, WI, USA) according to manufacturer's protocol. Transcript-specific primers were designed to specifically amplify the USH2A exon 68 inclusion amplicon, the USH2A exon 68 deletion amplicon or a reference USH2A amplicon. Amplifications were performed with the Applied Biosystem Fast 7900 System (Applied Biosystems, Waltham, Ma, USA). All PCR reactions were executed in duplicate, and relative gene expression levels compared with the reference amplicon were determined with the delta-delta Ct method. All primer sequences are included in the sequence listing and are referred to in table 1.

[0114] Immunohistochemistry and quantification of fluorescent signal intensity on zebrafish cryosections Zebrafish ush2a^{Δexon68}, ush2a^{exon68KO} and strain-matched wild-type larvae (5 dpf) were cryoprotected with 10% sucrose in PBS for 10 minutes prior to embedding in OCT compound (Tissue-Tek, #4583, Sakura, Alphen aan den Rijn, The Netherlands). After embedding, samples were snap frozen in liquid nitrogen-cooled isopentane and cryosectioned following standard protocols. Cryosections (7 μm thickness along the lens/optic nerve axis) were rinsed with PBS, permeabilized for 20 minutes with 0.01% Tween-20 in PBS and blocked for 1 hour with blocking buffer (10% normal goat serum and 2% bovine serum albumin in PBS). Antibodies diluted in blocking buffer were incubated overnight at 4° C. Secondary antibodies were also diluted in blocking buffer and incubated together with DAPI (1:8000; D1306; Molecular Probes, Eugene, OR, USA) for 1 hour. Sections were post fixed with 4% paraformaldehyde for 10 minutes and mounted with Prolong Gold Anti-fade (P36930; Molecular Probes, Eugene, OR, USA). The following primary antibodies and dilutions were used: rabbit anti-usherin (1:500; #27640002, Novus Biologicals, Centennial, CO, USA) and mouse anti-centrin (1:500; #04-1624, Millipore, Burlington, MA, USA). Secondary antibodies (Alexa Fluor 568 goat anti-rabbit (#A11011, Thermo Fisher Scientific, Waltham, MA, USA) and Alexa Fluor 647 goat anti-mouse (#A21237, Thermo Fisher Scientific, Waltham, MA, USA)) were used in a 1:800 dilution. Images were taken using a Zeiss Axio Imager fluorescence microscope equipped with an AxioCam MRC5 camera (Zeiss, Jena, Germany). Quantification of the fluorescent signal intensity of anti-usherin immunoreactivity was performed using Fiji version (v.)1.47 software [24] as described previously. Upon identification of the areas of the connecting cilia, the maximum and minimum gray value of usherin immunofluorescence in those areas was measured. The difference between those values was calculated for each individual photoreceptor cell after which the mean difference per retina was plotted. All data were analyzed using one-way ANOVA followed by Tukey's multiple comparison test. Statistical significance was set at p<0.05.

[0115] To asses rhodopsin localization in the larval retina, larvae (6 dpf) from homozygous ush2a^{Δexon68}, ush2a^{exon68KO} and strain-matched wild-type controls were sampled 100 minutes post light onset. Larvae were fixed in darkness overnight at 4° C. using 4% paraformaldehyde, dehydrated using methanol series with an ascending concentration, transferred to 100% methanol for an overnight incubation followed by storage at −20° C. Upon embedding, larvae were rehydrated in descending methanol series to 0.1% PBS-Tween-20. Afterwards, larvae were cryoprotected with 10% sucrose in 0.1% PBS-Tween-20 for 15 minutes, followed by an incubation in 30% sucrose in 0.1% PBS-Tween-20 for 1 hour at room temperature. Larvae were then embedded, snap frozen and sectioned as described above. Cryosections were rinsed with PBS, permeabilized for 2 minutes with 0.1% Tween-20 in PBS and, immersed in 10 mM Sodium Citrate at pH 8.5 and heated for 1 min at 121° C. in the autoclave. Cryosections were subsequently washed in 0.1% Tween-20 in PBS and blocked for 1 hour with blocking buffer (10% non-fat dry milk and 0.1% Tween-20 in PBS). Primary antibody (mouse anti-rhodopsin, 1:4000, #NBP2-59690, Novus Biologicals, Centennial, CO, USA) diluted in blocking buffer was incubated overnight at 4° C. Secondary antibody (Alexa Fluor 488 goat anti-mouse, 1:800, #A11029, Thermo Fisher Scientific, Waltham, MA, USA) was also diluted in blocking buffer and incubated together with DAPI (1:8000; #D1306; Thermo Fisher, Waltham, MA, USA) for 1.5 hour. Sections were mounted and images were taken as described above. Rhodopsin levels were quantified by manual counting. For this, all pictures were taken using the same settings after which the mislocalisation spots in the region of interest (outer nuclear layer), blinded and analyzed independently by two individuals. For all pictures mean counts were calculated and analyzed using a one-way ANOVA followed by Tukey's multiple comparison test. Statistical significance was set at p<0.05.

### Immunohistochemistry and Quantification of Fluorescent Signal Intensity on Organoid Cryosections

[0116] To asses usherin expression, organoids were fixed with 0.5% paraformaldehyde (PFA) for 15 minutes and consecutive cryoprotected in 7.5%, 15% and 30% sucrose in PBS prior to embedding in OCT compound (Tissue-Tek, #4583, Sakura, Alphen aan den Rijn, The Netherlands). After embedding, samples were snap frozen on dry ice and sectioned following standard protocols. Cryosections (10 μm thickness) were rinsed with PBS, permeabilized for 20 minutes with 1% Tween-20 in PBS and blocked for 1 hour with blocking buffer (0.1% Ovalbumin, 0.5% fish gelatin and 1% Tween-20 in PBS). Antibodies diluted in blocking buffer were incubated overnight at 4° C. Secondary antibodies were also diluted in blocking buffer and incubated together with Hoechst 33258 solution (1:5000; 23491-45-4, Sigma Aldrich, Merck, Kenilworth, NJ, USA) for 1 hour. Sections were post fixed with 4% paraformaldehyde for 10 minutes and mounted with Dako mounting medium (#CS70330-2; Agilent Technologies, Santa Carla, CA, USA). The following primary antibodies and dilutions were used: mouse anti-usherin (clone 3A9; 1:300), rabbit anti-ARL13B (1:2000; #17711-1-AP, Thermo Fisher Scientific, Waltham, MA, USA) and rabbit anti-CEP290 (1:300; #ab84870, Abcam, Cambridge, UK). Secondary antibodies (Alexa Fluor 488 donkey anti-rabbit (#A21206, Thermo Fisher Scientific, Waltham, MA, USA) and Alexa Fluor 594 donkey anti-mouse (#A21203, Thermo Fisher Scientific, Waltham, MA, USA)) were used in a 1:500 dilution. Images were taken using a Zeiss ApoTome 2 Upright wide-field microscope (Zeiss, Jena, Germany).

### ERG Recordings in Zebrafish Larvae

[0117] 5 dpf larvea were placed on a filter paper in the middle of a plastic recording chamber. The chamber contained 1% agarose, in which the reference electrode was inserted. The isolated eye was positioned to face the light source. Under visual control via a standard microscope equipped with red illumination (Stemi 2000C; Zeiss, Oberkochen, Germany), a glass microelectrode with an opening of approximately 20 mm at the tip was placed against the center of the cornea. This electrode was filled with E3 medium (5 mM NaCl, 0.17 mM KCl, 0.33 mM CaCl, and 0.33 mM MgSO4), the same in which the embryos were raised and held. A custom-made stimulator was invoked to provide light pulses of 100 ms duration, with a light intensity of 600 lux using a ZEISS XBO 75W light source and a fast shutter (Uni-Blitz Model D122; Vincent Associates, Rochester, NY, USA), driven by a delay unit interfaced to the main ERG recording setup. Electronic signals were amplified 1,000 times by a pre-amplifier (P55 A.C. pre-amplifier; Astro-Med, Grass Technology) with a band pass between 0.1 and 100 Hz, digitized by DAQ Board NIPCI-6035E (National Instruments) via NI BNC-2090 accessories and displayed via a self-developed NI LabVIEW program.

### Results

[0118] USH2A exon 68 is a promising target for exon skipping ASO-induced exon skipping is particularly interesting for large genes encoding (structural) proteins that contain series of repetitive protein domains, such as USH2A, and is particularly suitable for in-frame exons that harbor disease-causing mutations and do not encode a domain crucial for protein structure or function. Based on in silico protein analysis, and the reported presence of multiple RP-associated protein-truncating mutations, we opted to target exon 68 of human USH2A. Skipping of this exon was predicted to result in a transcript encoding a shortened usherin protein that does not lack any protein domains.

[0119] Numerous unique loss-of-function mutations have been reported in USH2A exons 68, making it an important target for exon skipping (USH2A, LOVD mutation database, databases.lovd.nl/shared/variants/USH2A/unique). Skipping this exon (177 nucleotides) will maintain the open reading frame of the USH2A transcript, and is predicted to result in the production of a slightly shorter protein that does not lack any protein domains (FIG. 3).

### Generation of the Ush2a^{exon68} Zebrafish Line Using CRISPR/Cas9 Technology

[0120] We and others have previously established the translational value of zebrafish models to study the retinal phenotype of Usher syndrome (Dona et al supra, Dulla, K., et al., Antisense oligonucleotide-based treatment of retinitis pigmentosa caused by USH2A exon 13 mutations. Molecular Therapy, 2021; Noel, N. C et al Zebrafish models of photoreceptor dysfunction and degeneration. Biomolecules, 2021. 11(1): p. 78). The human and zebrafish usherin protein share a similar protein domain architecture and an overall sequence identity of 52% (Dona et al supra). The length of ush2a exon 68 in is fully conserved in zebrafish, and the protein region encoded by zebrafish and human USH2A shows a 66% sequence identity. Similar to the human situation, the in-frame deletion of zebrafish ush2a exons 68 is predicted to result in a shortened protein (usherin^{Δexon68}) that does not lack any protein domains (FIG. 3).

[0121] To assess the effects of USH2A exon 68 skipping therapy on usherin protein function, we adopted CRISPR/Cas9 technology to generate a stable zebrafish line from which the genomic region encompassing ush2a exon 68 was specifically excised. For this, Cas9-sgRNA ribonucleoprotein complexes targeting the genomic region up- and downstream of exon 68, were injected in fertilized embryos (FIG. 4A). Anticipated exon-excision events were confirmed by genomic PCR and Sanger sequencing. A stable homozygous zebrafish ush2a exon 68 excision line was bred from a germline-positive founder fish, and designated ush2a^{Δexon68}. Similarly, a homozygous ush2a^{exon68KO} zebrafish line was generated. Injection of a Cas9-sgRNA ribonucleoprotein complex targeting ush2a exon 68 in fertilized embryos resulted in the ush2a^{exon68KO} zebrafish line carrying a cumulative 4 base pair insertion (c.14937_14940delinsGGGCCTCT; SEQ ID NO: 57). This lesion is predicted to lead to a frameshift and premature termination of protein translation. Homozygous ush2a^{Δexon68} and ush2a^{exon68KO} fish were viable and did not display any abnormalities in overall body morphology, development, or swimming behavior.

[0122] To determine the effect of the excision of the target exon from the zebrafish genome at the transcriptional level, total RNA was isolated from pairs of homozygous ush2a^{Δexon68} larvae. RT-PCR analysis using a forward and reverse primer in respectively exons 66 and 70 of the zebrafish ush2a gene detected a shortened PCR fragment in the ush2a^{Δexon68} zebrafish in the absence of any clear alternatively spliced ush2a transcripts (FIG. 4B). Sanger sequencing confirmed the expression of the expected ush2a transcript exclusively lacking the anticipated target exons from the ush2a transcripts derived from the ush2a^{Δexon68} larvae. Similarly, correct expression of the ush2a mRNA containing only the expected introduced lesion was confirmed in ush2a^{exon68KO} zebrafish (data not shown).

### Excision of Ush2a Exon 68 Restores Usherin Protein Expression in Genetically Modified Zebrafish

[0123] To investigate whether the excision of ush2a exon 68 resulted in the translation and correct localization of the usherin^{Δexon68} protein in photoreceptor cells, an immunohistochemical analysis was performed. In the wild-type zebrafish retina, usherin is expressed at the periciliary region of zebrafish photoreceptors [Dona et al supra, Dulla, K., et al. supra]. Antibodies directed against the intracellular region of the usherin protein and antibodies directed against the connecting cilium marker centrin were used to co-stain unfixed retinal cryosections of 5 dpf wild-type, ush2a^{exon68KO} and ush2a^{Δexon68} zebrafish larvae (FIG. 5A). As expected, usherin was absent from photoreceptors of ush2a^{exon68KO} larvae. Usherin^{Δexon68} proteins localized at the photoreceptor periciliary region, adjacent to the connecting cilium marker centrin, similar to the localization of usherin in strain- and age-matched wild-type larvae. Quantification of the amount of usherin^{Δexon68}protein was performed based on the detection of fluorescent intensity levels using an automated Fiji script. This analysis corroborated that excision of ush2a exon 68 leads to a restoration in usherin protein levels with the anticipated subcellular localization (FIG. 5B; means, standard deviations and n-values are shown in Table 3). Usherin immunoreactivity is significantly decreased in ush2a^{exon68KO} mutants as compared to wild-type controls. Excision of exon 68 resulted in a restoration of normal anti-usherin fluorescent signal intensities.

TABLE 3
Means, standard deviations and n-values of anti-
usherin fluorescence signal quantification.

| Zebrafish line | Mean | Standard deviation | n |
|---|---|---|---|
| wild-type | 46.32 | 14.76 | 9 |
| ush2a^{exon68KO} | 7.17 | 3.30 | 13 |
| ush2a^{Δexon68} | 38.32 | 19.59 | 13 |

n: number of zebrafish.

### Excision of Ush2a Exon 68 Restores Rhodopsin Trafficking in Genetically Modified Zebrafish

[0124] Loss of usherin function was previously shown to lead to defective rhodopsin transport from the inner segment towards the outer segment of photoreceptors. We therefore investigated if excision of ush2a exon 68 would still result in normal rhodopsin trafficking. In the retinas of 6dpf wild-type larvae, rhodopsin localized to the photoreceptor outer segments (FIG. 6A). In line with previously published data, occasionally photoreceptors were detected in wild-type larvae in which rhodopsin was partially localized to the inner segments. In retinas of ush2a^{exon68KO} larvae, the amount of photoreceptor cells per retinal section with aberrant rhodopsin localization was significantly increased (P<0.0001; one way ANOVA followed by Tukey's multiple comparison test). Quantification revealed a significant reduction of the amount of photoreceptor cells with aberrant rhodopsin localization in ush2a^{Δexon68} larvae as compared to ush2a^{exon68KO} larvae (P<0.0001; one way ANOVA followed by Tukey's multiple comparison test), while those levels were comparable to wild-type larvae (FIG. 6B; means, standard deviations and n-values are shown in Table 4). This suggests that the usherin^{Δexon68} protein is able to support normal ciliary trafficking of rhodopsin to the photoreceptor outer segment.

TABLE 4
Means, standard deviations and n-values for the quantification
of photoreceptors with aberrant rhodopsin localization.

| Zebrafish line | Mean | Standard deviation | n |
|---|---|---|---|
| wild-type | 4.75 | 4.08 | 11 |
| ush2a^{exon68KO} | 15.69 | 7.62 | 13 |
| ush2a^{Δexon68} | 1.73 | 0.88 | 11 |

n: number of photoreceptors with aberrant rhodopsin localization.

### Excision of Ush2a Exon 68 Restores Visual Function in Genetically Modified Zebrafish

[0125] ERGs were recorded from wild-type, ush2a^{exon68KO} and ush2a^{Δexon68} larvae. ush2a^{exon68KO} larvae demonstrated significantly reduced b-wave amplitudes as compared to age- and strain-matched wild-type larvae (p<0.01; Kruskal-Wallis and Dunn's nonparametric test). CRISPR/Cas9-based excision of ush2a exon 68 resulted in significantly increased b-wave amplitudes as compared to ush2a^{exon68KO} larvae, which is indicative for a restoration of visual function (p<0.05)(FIG. 7; standard deviations and n-values are shown in Table 5).

TABLE 5
Normalized means, standard deviations and n-values
for the quantification of ERG b-wave traces.

| Zebrafish line | Mean | Standard deviation | n |
|---|---|---|---|
| wild-type | 1.00 | 0.19 | 61 |
| ush2a^{exon68KO} | 0.87 | 0.23 | 49 |
| ush2a^{Δexon68} | 0.97 | 0.21 | 54 |

n: number of zebrafish.

### Identification of Splice Modulating Antisense Oligonucleotides

[0126] Based on the ability of usherinΔexon68 to properly localize in photoreceptors, we aimed to translate these findings into an ASO-based exon skipping approach for a future use in man. For this, ASOs specifically designed to induce skipping of exon 68 from USH2A pre-mRNA were validated in vitro. Two ASOs were designed to target the intron-exon boundaries and numerous splicing enhancer (ESE) motifs. With the use of in silico analysis, parameters for (lack of) secondary structure formation, thermodynamic properties, and sequence selectivity were taken into account to minimize potential off-target effects. As a non-binding control, mismatch ASOs (mmASO) were used that contained four mismatches relative to the target sequence. All ASOs contain 2′-O-(2-methoxyethyl) modified ribose groups and a fully phosphorothioated backbone. ASOs and their accompanied non-binding controls, are listed in Table 2.

[0127] The designed ASOs were co-transfected with the exon 68 minigene splice vector in HEK293T cells at a 1000 nM, 500 nM and 250 nM concentration, and screened for their potential to induce exon skipping (FIG. 8A). ASO_68_2 showed highest exon skipping potential and was therefore selected for follow-up experiments.

### The Antisense Oligonucleotide Induces Exon Skipping of Wild-Type and Mutant USH2A Exon 68 in a Minigene Splice Assay

[0128] After the selection of the ASO with the highest exon skipping potential from the initial screening, we lowered ASO concentration in order to provide proof of concept for ASO-induced exon skipping. As shown in FIG. 8B, we observed a dose-dependent increase in the level of transcripts in which the target exon was skipped with increasing concentrations of ASO. The ASO targeting USH2A exon 68 induces a turning point in exon skipping potential between a concentration of 20 and 100 nM ASO, with full exon skipping after treatment with 200 nM ASO. As a control, we co-transfected the minigene splice vectors with a target-specific mismatch ASO (mmASO). Not even at the highest doses that were used, the mmASO was able to induce splice modulation.

[0129] To elucidate whether the most potent ASO was also able to induce the skipping of mutant USH2A exon 68, we co-transfected HEK293T cells with the ASO and either of two minigene splice vectors containing a patient mutation in USH2A exon 68 (c.14792-2A>G or c.14803C>T). The c.14792-2A>G mutation is targeting the canonical splice acceptor site of exon 68, resulting in the recognition of two new splice acceptor sites, one 62 bp upstream of the canonical splice acceptor site and one 8 bp downstream of the canonical acceptor site (FIG. 8C). Recognition of those new splice acceptor sites by the splicing machinery is predicted to lead to a frameshift and premature termination of protein translation. The c.14803C>T mutation directly results in a premature stop codon p.(Arg4935*). Indeed, co-transfection of HEK293T cells with the mutant USH2A exon 68 minigene splice vectors and ASO at a 200 nM concentration, resulted in USH2A exon 68 skipping (FIG. 8D). The mmASO was not able to induce splice modulation. All exon-exon boundaries of the amplicons were sequence verified.

### The Antisense Oligonucleotide Induces USH2A Exon 68 Skipping in Patient Derived Retinal Organoids

[0130] Based on the identification of a potent ASO able to induce exon skipping of wild-type and mutant USH2A exon 68, we further characterized the efficacy of the ASO in a 3D retinal organoid model. iPSCs compound heterozygous for the c.14792-2A>G splice site mutation (exon 68) and the c.4174G>T stop mutation (exon 19) were generated from patient-derived fibroblasts and further differentiated into 3D retinal organoids. To elucidate the optimal ASO dosage, a pilot study was performed in which patient-derived retinal organoids were cultured for 113 days and subsequently treated once a week for a period of two weeks with 1, 5, 10 or 15 μM ASO. Upon treatment, 50% of culture medium was refreshed with fresh culture medium containing a new dose of ASO. RT-PCR analysis using forward and reverse primers in USH2A exons 66 and 70 respectively, revealed in the untreated mutant organoids the wildtype non-skipped amplicon, the same mutant non-skipped amplicons as observed in the c.14792-2A>G mutant minigene splice assay and a trace of natural occurring USH2A exon 68 skipping (FIG. 9A). No signs of exon 68 skipping were detected in untreated wild-type organoids. Results furthermore showed a dose-dependent increase in the level of transcripts in which the target exon was skipped with increasing concentrations of ASO. Photoreceptor differentiation markers were expressed in all treated and untreated retinal organoids confirming the presence of photoreceptor-like cells. (FIG. 9B).

[0131] To increase USH2A exon 68 skipping levels, two replicate follow-up experiments were performed in which the duration and frequency of ASO treatments was increased. Organoids were now treated with a total of eight doses of 15 μM ASO, twice per week, from day 197 until day 225. The level of USH2A transcripts lacking exon 68 was significantly increased to 67% of the total USH2A transcripts as a result of this treatment paradigm (P<0.0001; one way ANOVA followed by Tukey's multiple comparison test) (FIG. 10A, 10B, 10E). Transcript analyses of photoreceptor differentiation markers again confirmed the presence of photoreceptor-like cells in all treated and untreated retinal organoids (FIG. 10C, 10D).

### ASO-Induced Skipping of USH2A Exon 68 Restores Usherin Protein Expression in Patient-Derived Retinal Organoids

[0132] To investigate whether the ASO-induced skipping of USH2A exon 68 resulted in the translation and correct localization of the usherin^{Δexon68} protein in photoreceptor-like cells of patient-derived 3D retinal organoids, an immunohistochemical analysis was performed. Antibodies directed against the intracellular region of the usherin protein and antibodies directed against the ciliary rootlet, were used to co-stain cryosections of 225 day old wildtype, mutant untreated and mutant treated 3D retinal organoids (FIG. 11A). As expected, usherin was present in wild-type organoids, at the tip of the ciliary rootlet of the photoreceptor-like cells, and absent from photoreceptors of mutant USH2A organoids. Upon treatment with a dose of 15 μM ASO, twice per week for a period of four weeks, usherin protein expression was restored with a correct localization at the tip of the ciliary rootlet. Antibodies directed against usherin and the basal body marker CEP290 were used to confirm localization of usherin at the periciliary region of photoreceptor-like cells in both wild-type and mutant treated organoids (FIG. 11B).

1. An antisense oligonucleotide for skipping of exon 68 that binds to and/or is complementary to a polynucleotide with the nucleotide sequence as shown in SEQ ID NO: 1.

2. An antisense oligonucleotide for skipping of exon 68 according to claim 1, wherein the antisense oligonucleotide has a length of from about 8 to about 40 nucleotides.

3. An antisense oligonucleotide for skipping of exon 68 according to claim 1, wherein the antisense oligonucleotide comprises or consists of SEQ ID NO: 8 or SEQ ID NO: 9.

4. An antisense oligonucleotide for skipping of exon 68 according to claim 1, comprising a 2′-O alkyl phosphorothioate antisense oligonucleotide, such as 2′-O-methyl modified ribose (RNA), 2′-O-ethyl modified ribose, 2′-O-methoxyethyl modified ribose, 2′-O-propyl modified ribose, and/or substituted derivatives of these modifications such as halogenated derivatives.

5. An antisense oligonucleotide for skipping of exon 68 according to claim 1, wherein the antisense oligonucleotide comprises or consists of SEQ ID NO: 8 or SEQ ID NO: 9 and wherein the antisense oligonucleotide comprises a 2′-O-methoxyethyl modified ribose and a phosphorothioate backbone.

6. (canceled)

7. A pharmaceutical composition comprising antisense oligonucleotide for skipping of exon 68 according to claim 1 and a pharmaceutically acceptable excipient.

8. A pharmaceutical composition according to claim 7, wherein the pharmaceutical composition is for intravitreal administration or intratympanic administration.

9. A pharmaceutical composition according to claim 7, wherein the pharmaceutical composition is for intravitreal administration and is dosed in an amount ranged from 0.1 and 15 mg of total antisense oligonucleotides for redirecting splicing per eye or per ear.

10.-12. (canceled)

13. A method for the treatment of a USH2A-related disease or condition requiring modulating splicing of USH2A of an individual in need thereof, said method comprising contacting a cell of said individual with the antisense oligonucleotide for skipping of exon 68 according to claim 1.

14. (canceled)

15. (canceled)

16. The antisense oligonucleotide for skipping of exon 68 according to claim 1, wherein the antisense oligonucleotides binds to and/or is complementary to a polynucleotide selected from the group consisting of SEQ ID NO: 2 and SEQ ID NO: 3.

17. The antisense oligonucleotide for skipping of exon 68 according to claim 1, wherein the antisense oligonucleotides binds to and/or is complementary to a polynucleotide selected from the group consisting of SEQ ID NO: 4 and SEQ ID NO:5.

18. The antisense oligonucleotide for skipping of exon 68 according to claim 1, wherein the antisense oligonucleotides binds to and/or is complementary to a polynucleotide selected from the group consisting of SEQ ID NO: 6, and SEQ ID NO:7 or a part thereof.

19. The method according to claim 13, wherein the USH2A related disease or condition is USH2A-associated Retinitis pigmentosa (RP).

20. The pharmaceutical composition according to claim 8, wherein the composition is dosed in an amount ranged from 0.05 mg and 30 mg of total antisense oligonucleotides

The application's sequence listing, which the Patent Office published only in electronic form, follows.

SEQUENCE LISTING (58 sequences)

SEQ ID NO: 1 - DNA, 800503 bp, Homo sapiens
  source 1..800503: mol_type = other DNA; note = USH2A genomic DNA wild-type
tgtttgctctgcagaatactttacctgggcacccaagtcttccttccagcattcctgctgctacagcctatttgctgagtaaccaggggttacagcagcgttgccaggcaacgagggacagcggtcctgttgaagagccatttgtcacactgaggggactggttgaaatgcaataaagaaatggtaactcagcttatttatcaatacaattacttgcacagtattagggatccatgtgtaacctacaaattcatagtcatatgaggaaacacagaaacattttgctaaatattaaagcataggacagacagatggtgttgggtttctaatcagctttactctgagcttaaagttgctgcacatgctgggataaggggaaaggcccaaagtcctttgccagctttattttgggcatctgtaagttagctctgggttacaatgtacagtgcatgtgtaaagaaaatctacaagattcttttccctgttaagtagagctggtaatgccattgctaattccctggggtgaagtaacaacacaaaattattgtatgtgtaatatattattaataattatatatatataaaacacacacatatattatataaatatttatgtataactggttataaatattactggttgtcctgtggacttataaagtgcttgatttgcccaatgcaatcaagagatttaccaaaaggatgagtattttactctgagcactgtgcttcaaaatgttttttgagaagttcagtagtgttgcttctaggagctcaaagtcctcaggcctgggatgagcttcagttttaaaggtgcagcagctttcccttgacgccctacgtttttgattcccagataccagcagctactcatgtcttcgccattgctaagaacgtcgttggtattaccttactctgagaacgtgtctgcagtttccagaaaatggagtatcgcaacatcacttaaagtaccctgcttcaaagtattgctggcaagtggcgtgggcctgattatttatttagaaatgctttatcaggaggagaatgcttttttgtaaacatgaattgcccagttctttcattgggctctggcttcttgtttcaggtcattgaaatgttgatctttgcctattttgcttcaatatccttgactgagtcacgaggtcttttcccaaggctggagaacgtgggagctttcaagaaagtttccatcgtgccaacccaagcagtatgtggactcccagaccgaagcactttttgtcacagctctgctgctgctgaaagtattcagttctgtacccagcggttttgtattcaggattgcccatacagatcttcacaccctacctacactgcccttttctcagcaggcctcagtagctgcatcacaccagacaagaatgatctgcatcctaacgcccatagcaattctgcaagttttatttttggaaatcacaagagctgcttttcttctcctccttctccaaagctgatggcatcatttaccttagctgtatggctgaaacctgagcaacaaggtgtaatgtaagtagtagtgtaggtataagctttcataggtccccaaaaccagtagtagtgaagatcatttcagcctgaattccaaaccggaagtgaaggctatatagaattcatggtattgaagactaactcttccagttgtttccccaattaaaatttttttctcttctatggatgaaatggaccatgaaaaaaaatgtgaaaatagtttatcaaaggcaaatgtgtttatgcaggaatcatttattttctatagcttagcgcgacctttggtcttagccttcaaagcctaaagaagactcagagtgagttttaaggcatggaaacttgtaattaatacaaataattaatattttcaaaatcttgaactgggtttatataatcaacatttccttactagggtataacattttcattaggcagatagttctcccagtccttgggactgttttcttcatcctcgtttccccaagaagagctgtttgtttgactcatggaagatgttcagtaatataaattgaatatataaataaccctccatctctaaaaacatatagcttttagttctttatcttgtggtattttcattttccaattagttaggaaatatgtaggtaagtgtgagagattctcaaaagctttcatgctgttcatcccagagaaatgccttcaatgagtctgggtcttattactgccattttttgttatttaatcaccagtttttcattctgtaatcttttctcaagctgatatctaatgagtttcttctaaatatttattgccaacctggagattttaatatacaggacagttttgaggaatttttgcttatcttttttcttcctagagggcttttggccctttctcttgtgacattttctgtgtgtgacagcgttggctggatatctaaaaacttgtgaaacaaaccagaaaaggattacaatctcataagcaaataggacttaaatgtttttggtgtttagtttcaatttgccaagtgaaagttggcatgtcttcattttgttttaaatttggattaatcacaaaattaatcacaaaccattcccatttctacatctctcctcaaagaaaaccttgttttcttactgtttgaaattctagtaaattcaagctactcagtttatataattaacatctgaagagtcttaaaacattgtcttttgacaaatagggctaagataaaatatccttctgagcttgtagggacatatctgtaccaaattcatcttctattgacatcattttgtataaataagacagagaagtatttacagggttggaagaacatggttaatggttttgagagttccttgtatcaaggtcgtttccattttcaaaattaaaatacctttgggaattgggggaatttcggggtgtttgcactagataagtaaaacaaacaaaacatggattatccaattattgtttattcaggagcagaataaatccagttcctaaatattttgctacctgccttcctctcacatttattatctaccaaagctagtatgtttacaagcaaacaaaatagcaaggaagataatcaataacatattaagaaatgcattttcagtaagcttgggaaaataagtctgcatttggtaaatacattcttgagtaatggtcgaattctcacttgtagatttaaacagaagaaaaatgaataggggcaaactcttttcaggttaagacctgatgggtagggataaaaacaaattcacttcagtaaattagaaatattcaactactgaagggttaaaaatataatttgcagtagaatttatataaaacttttatttctacttatataaaacctttatgtcatctaaatctatttgcctaaattaaaaatatacttgcactcataactttataccaaatatacatacaaaatatagtaaaattgtgacagtaaatgagggactattagtgttttacaatcttattcttacctcccaactcaggaaaaaaatagatgcaagtgatagatgcaagtgagaagaaattatgtgtgaaaaacatgccctttaaggaaagctttaaaccatctttagcagtaattcttgattggctcaattttatacatttgcctctctgatacttcctaccaaatttgatcacaaactcatcattttttgagagactactgtatcctaggtgtttgtgtgtgtatcctcagaatactcatgatctaaatgatctaatggagtgtacagatggatgagtgttattacctaggcagcacagtgtgttaagtgagcacaaagtgagacccctcaaccgaccctgagcaggaagaagggtgccaggaccaagcataatcattcagataccaaagctaagtaggaggtaaccaggtgaagaagagacctcaaggtctgaaaggtgtgtcactctaataagggtagagataacttaaaataatttgataactgccctgacacaagacctggaagttttctgaaaactcttctagtttttcaaaatcttatttcactgtgttctagaaggctgaaggacctttcacctcagatatttaacatgatctcagtacctcagttggactgtacggtcatggagaggtagccagtcatcttacagacactggctttggctttgtgccagttgatgatggggtgagtagagactatagctgtccattcttcatttcaccatgggaattaaatagagtgattctgacttcagggctaccaatttagagccttccatggacactaaatttgctttacattaaaaaaaaatttttgcactgatgacttaatactcaagcggcctgtagtgtgttgtaccacttcctctaaaagaaatagcaggagaactaatgagccaataacctaaatgttagttttgcagaatgattcaaccactttagtttccatcatgaatctctaatgaagggtgctgaggctctggggaatatattgtaaataagaattctattttttattgaaataaaggggcttcttcattggaataaagctttcattgaatataatgacattcaggcacttattcatagtacaccattttgagcaaagtttgaggtcattttaacaccactgtaactgcacaataccttagcatgtctttttggttggatgctgaccttttctctcttttccggttgcttcctaaggtgtgttatagaaaagacagtagatgggcagattgtgttcaaacttacaatatctgagaaagagaccatgttttattatcgcacagtaaatggtttgcaacctccaataaaagtaatgacactggggagaattcttgtgaagaaatggattcatcttagtgtgcaggtgagtaaaataaaaaatatttaacatttggttaaacacaaggatttgtcttcctttctctcttttaaatggcatctactcacaaaatctgcagcagtatcttttagatttcaggtgtgtataaatgacaactaaagaagaaaaatatttaaatgacctaatgatgtatctcttgatatactagcatttcctcccccaaaattgctgtaaaagctctcacagaaacttaaagacaatgctatctgtaattgtaatatcctcagaaaatttttgttttcttgggttcgtatattctattttgtttaaaaatgtgtaagggctcatttgatgtctggtactaattttactagtcatggatgtattaataccccagcttgatttttacatctgtctttctcagcagctgatgatgtgaataaaatttgtctgttgcattaaaatggtgaccttagaactaatgaactttacacttgaggcactcaaaaggtgttatattattattttagttgtcaaccacagtttgtatgagccttagaagctgctaaaggctgagagagctgtgacatgtctggtatttacagtctccagaagagaggcacagttcatccttttgttttttcagggcactggaatggcccaatacagttaaagccacacctgcctttcaaaccaggtgtattagtccattcttccactactataaaaaataccggagactgggtaatttattataaagaaaagaggttcaattggctcatggttctgtgggctatacaggaagcatgattctggcatctgctcagcttctggggagaccttagaaaacttacaatcacggcagcagacaaaggctgagcaagcacttcatgtggccagaatagggaggaaaagaaagaaagggaggtacttcacacttttaaaccaccagatctcatgagaattctatcaggagactagcactaggtggatggtgttaaagtactgatgagaaaacgtctacatgttccaataacctcccatcaggccccaccaccaaagctggggattacaattggacatgaggtttgggtggggacacagagccaaatcatgtaacttggggtgctgggtaccacagtttccagtatgagctctcatatgagcatccatccagtggctcatgtgaacctcatttgaactagaggacatttacatccttgttcattttataaaaattatctttgatttctcacttttttttttttttttaatcttgaagcagataatgagtgtgcgtcctcagagggtcttgataattgttcattgttttggctttcagatactaagatatgagtttagcaaatgtgattggcaggggtcagagttttcatacacaactagggttgaaatgatacacaaaggggacgtcatgtctgacgtcaagccttgtgcataggacatgatggtttctgattctcaatgcttattctccatgtgttcagtagttaacagataggagaccaatttgtcctagtcttgaagtttccattgtcttgaagtctccattctgcccactgaccagtcctacagaattgggttttaatattaaaaacgtagaaatagaaacttttaaagacagtgccatctttgcagaagatgccaaatagatatgtttgttgcatatttttgtatcaacaatgacaaaaaaattatctttacttgcctttattttgtgttatctgtgaaactgtgccatgttttggcaggcagtagtacattaaaagcttcacaaagaaagtttaaaatctaaatgcagagcggtaaccatgactgaattactcccttggggataaaatgctcttagagtgcctactgaaatcagcattatcatttcaatacatgtcaaatatgagtcatttactagtttaggcaaaatttcttcatgaatctttaaatctttctcttctttcaagaaaaggttaaagtacttatgatttaatgagactgctttatttcataactgtttgactatcaagagaaaacttgtccttttcgatttgtacactcttttatttatttttttgcataagttttaaactattctgcattttatattaaaactacagaactaggcagtcacaaaatgttagaaaaccattcagatctgtcatttaatcatctagcacttattaaatatttgaggggtatgcagcattatgggaatctggatttattcaaatgaaaattaaagagcaattatttactctaaaatggagctctatataaggttcctttatattggacaacagtctgaatatgtttaaggtattatgaaatttataaaaatccatattatagatttttttttgagacagagtttctcccttgttgcccaggctggagtgcaatggcatgatcttggctcactgcaacctccgtctcctgagttcaagagattatcctgcctcagcctcccaagtagctgagattacaggtgcctacaaccacactggctaattttttgtatttttagtagagaaggagtttcaccattgttggccaggctggtctcgaattcctgacctcaggtgatccacctgccttggcctcccaaagtgatggtattacaggcatgagccagagtgcccagcctagattttgaaaaaggaatgtactgattactcaaaagttgttataagaaataatggaggccaggcgcagtggttcatgcctgtaatcccagcattttgggaggtagaagtgaacggatagctcgaaccaggagttcgaggccagcctgggcaacatggcaaaacctcatctctacgaaaaaacaccctaaaaaaattagccaggtgtgatggtgcgtgtctgtagacccagctactcaggaggttggggctaaagtgaaaagatcacctaagcctggaagtcaaggcttcagtgacccatgatcatgccactgcattccagcctgggcgaaagagcaagatcctgtctgaaaaaaaaaaaaaaaaaaaaaaaaagtgacaggaaggacaggagattaggagttgggaaatctgatttaggttatgctactctgtagtcttaagaataaaatttataggaatccatatgatagttgtttaataaggaatgtactaattgcttaaacgttgttataagaagtaatggaagctgggcacagtggctcacacctataccctgcccgccttgacgtctcaaactgagtcatttgactcagttttcctatttacataagaagattgaactagatgaacaaaatgagggccttttgaattcttcataaacaagtaagtggagtgtggagtgtagcacaagtcattaaagtatggcaagctgttgagttgtgtagggttatttaggtagtaagtgacagagccagccccattaaccaatgatcagtcttgtgctttttttctcttctcccatgctgcttggcatttacataaaaacatttttttgctagattttctggacaaaatatagagaaatgtagattgttactattccattgtataactgcaagaacatttccagaaaaaatattttagtataaaatgtaacttactgttgcatgattatataatgcatctaaactccatttaatttggggattagggacttttatcatgctgggcataggacagaacaaatgattaataatcttgtttagtcaagtttcaaactacaaacctgcactttatgtatatgtggattttcacccatcttccaaatggccacaaattgatgaatttatatagtgtgtgtgtttctgtgcatgtgaaaaaataaaacatacaactctattcgtggaatggcccagaaaccagaattttagttcgttgcttatagtgattttttactggttagcttatacctggtggcataaaattaattagcagatctcaacttatgctttatctcagacagttcacttgtatcagctttccatcagtaaaatcagaattctaatttaccaaaatcagaaaaaaaattattttaaataattaaatatctgggggaaaagatgtcaggaaatccagacataccaaaattggaaatcgaatttcctaaacaaacaaatagacaatatgctcaatattgctatggtaatgaatctcacagcttttattccaaaactagcattttaaagtgtcaatctgttggaaaatgattagtgtttaaattaatattcatttatggacttgaatctgacaggattgccaattgaaattttactttggggtttaatatattggctatttcaaattatatcaagctaaaattcattgtgtcattttttatactaaaactagaaaaaatcaattcatagtttttattatcatatagggaacactgatcatattagcaaaatttttaaagcttagttttcatattaaatcagcacatgctgtagttataagatttcctttggttactcttataaaagttttgaaatatgtaaaaaaatttactttagcatttcgttatggattggtaggtaaaacaatatggaaataagtatatgtgtttagtggcatttcatttaaaagtaaaactttagggttttctttgacaatatattttgccttaagcagttccacacattttatagcccaaatagtgtcaaagaatcatcagtatagtcatccttctagtaattatgcagaattgcagtaaaacaattactacgatttgaagctgatgaaatactacagctgtggaaccaagaaatgatttagcattgggcttgttcacattttctatgctattttcagggctccttgatacattgacaattcaagagccatagatgactctagctacaatagtgtgaaaaagagcagttctaatatgatacaatgaagaaaaaaatgcatgggtaaataaagttttaggaatcaatatatgaaggataggagtttcataatcacagttcatgaagtatgctcttttgatttatgtattcaatctaagaaagaaaaactattgatagttctggaggaaaacaaaatgcaatttaaccaacatttgttagaatagataaaccaagtctctcaattaatctctgaactgtatgcccatgtgcacactttataaaggtgtttccatgttcctattgattgagggaacataaaacatccatgtcaccttatggaagcctcctcattcagttcagtaagctttatggcatagaattgtcataggaataccatcccagccccactcccattctaagagaatctcaacccatattatttctttaatatatcattgcatttagctctgactctgtgtgtgtgtgtatgtgtgtgtaagtatgcatgcatatgtgtgctaaatgtttctttgtgcaaagccttctctttatatctagccagctgggttaacagctcaagttagttgaatagttttgggttattcaaaataaattaagatcaatagaatataatgaagtttttcagaacaatcagttacaaattatcatagctgctattaatcattgatttatgtgcactatattaaacatgttacatatttgcagttatacaatgaaatagtgacatgcttgtaacatgtttaatatagtgttaataatagctctgtgccactgacttatattatctccatgacagagattttaaaaaattagccttaggaaatttaaactacctgcctacatttatagtcccaagcttctctgaccttaaactaaaagtaataacttgccatgaacatgggtcactgagcagatctaaataatagtttttaaaattctccaaaccaaaaaaaaaaggcacagaatcccaaaagaactgaaaacatatatttataatgtaaatataattttgtatatttatacatatttgtaatataaatattttcaatgcttcagatatttacatgatttatacaaataattaaagtcaatatattttttaactatacccctcattgatacaagcaatttaaatgtacaacagaatgtaattttgtataaagttctgcgcaatattttcatgttttatggcagttgcgatagactacaatggcttaaagaaagaatatttcccttaagccagcctgatcacctgacccatgccttatagaatcaacccttattacaataaaatacaaagaaggaagcacttcctactttattatggaagaggtaaaaccatccaagtaaaaaagtaattattctctgtacgttttttgcatgtgattttaaaatgcaatatttaagcagaaggcaaggctttaattcttgaccttttagtaaaaaattgtgcaaccctgggaaaactatgtaactcctcaaaatgttaggatacccattacaaattggaaacaaacaaacttggcctatttagcttacaccataaatttgaacatataaagaaaatattgtctactaaaacactttatagcctataacttcctgctatgaaggagcttacagtctcttcagaggataagcaatcaaataattacacaaataaaggcaaaattataattgtggtaagtgctacatgatcacatgaagaatgatttggtcaaaccactgaagtcaagaaaagcttccttgagtaaatgttattgaatatgtgtattagttttctaggcctgtactaaaaaattatcacaaactggtggcttaacacaacagttaattcattgttgaagagttctggaggctagaaagctgaaatcaagttgttagaagggccatgctctttctgaaacctctagaatccttccttgtctcttccagcatctggtgtttgcacagacaccagagtatgtgattgtgctacctcctggggtttgtctgcccacagcaaggccgggaacccagaaaagaaaagaggagtgcccagtgtagccaccacccactgcatgagaaacagagctggcagcaatccttgatgctccttagcttgtagctacatcactccagcctctgtctgcattatcatatggtcctctcctctgatcgtgtgtgtcttctcttcttataaggacatcagttgtactggattaggattcttcctaattcggtaggactcatcttaacaattacatccaaaaagacactacccaaataaggtcagagtcacaggcacatagggttagggcttcagtatgacttttgatgggacacagttcaactgatagtaagatttattcaaaagaatgcataggatccaactgggcaaagagaattgataagaacattccataaatgcatagcaaatagtgtaaatgcccttgtataaaaagaaatatgttacatagactaaaaaaccaaagtggttagagtgtcgctggcaaagtgggacatggtgtgaaatgaggacagaacagtaggaagaggctatgtgttaaagagaatcactggatatgttaagattttttttttaaatggaactctattgaactgttttatgtgaaggacaggagatgagggatgaggataaggaaggaaaacgtatgatatgcacagattattttttcctaaagatcactttggctgcagtgagggagaatggtttgcttgaagacaagtgtgaagggttgttatggtattttcatggaccaagtcagatgtaagtgttacttacttacagcatgaagacaatagtgaatatgcaaatgaatggtcagctttgagaggagtttaagaattaaattaaagggcttgttgatgaaggaatatgtaatatgagggaaagggagttgatgaatcccagctttctggcttatgtaattgcaggtacagtgatttctttttctcaaatagaaatactggaagagaatcagattttggatgtggagcacatatgaattagattccagtttagggtaataattctcaactatagaaattattagcattattgagaaactttaaaaaatattctgatgtccatatccctttatgtcttcattggtctaggtggggcgcaggcattatttctttctttcttccttccctgatggatttaaaaaggtgtaacaaaagaaaatatcagtctaccattgatgagcatttaggttggttccatatctttgctattgtgaacagtgctgcaacgaatatacatgtgcatgcgtctttatgatagaatgactcagattcctttggatatatacgcaggaatggaattgctgggtataatggtagttctgttttttttggtctttgaggaattgtcacactgttttctgtaatggttgaagtaatttacactcccaacatcagcctattaagcattcctttttctctgcaacctcactagcactgttgtttcttgactttttaataacagacattctgactgatgtgagatggtatctttcattgtggttttgattgacattgctctgatgatcagcgatcatatgcttgttggccacatgtatgtcttcttttgaaaagggtctatttatgtcctttgcccactttttaatagggttgtttttttcttgtagatttgttgaagtttgttatagaggccagctatcagacctttgccagatgtatagtttgcaaaacttttctctcactctataggttatctgttcactctgttgatagttcgttttgctgtgcagaagctctttaatttaatttgatcccatttgtcattgcttttggcatctctgtcgtgaaatctttgcctgttcctatttcctatgtccagaatgctattgcctagattgtctttcaggcttttagttttgggttttacgtttaagtctttattccaacttgagttgatttttatatatggtataaggaaggggtccagtttcaatcttctgcatatggctagccagttatcccaacatttattgaatagggagtcctttccccattgcttgtttttgtcagctttctcaaagatcagatggtggtaggtgtgatggccttatttctgggctctctattctttttcttcggtctatgtgtctgtttttgtaccagattcatgctgttttgcttactgtagccctgtagtatagtttgcagtcaagtaatgcaatgcctccacctttgttatttttgtgtaggattctctgtctatttgggctcatttttggttttatatgaatttaaaaagtttttttctagttattccaagaatgtcgttgtttgtttgatagaaatagcactgaatctgtaaattgctttgggcaatatggccattttaacgatattggtccttcctattcatgagcatggaatgtcacacaaaccaatgatatctgtttgtgtcatctctgatttatttgagcagtgctttgcatttctcattgtacagatctttcccctccctggttaactgtattcctggtattttattctttttgtggcgattgtttcacctgcttctaatcaaatctatttagtagctgttattaaactgtgtagccattagtatacagtagtactccattacccttggctttgctttctgttgtttgtcacccacagtcaaccacagtctgaaaatatcaaatggaaaatttcagaagtaaacaattcataagttttaaattgggtgctgttctgtgtagtgtgatgacatgtgaggtggtcaccatacctcctgcctgggaggtgaagcatccctttgtccagcagcttctccatattgtctatgctcctagcccttcagtcacatagtagctctcttagtaatcagatcagctgttgctgtatcacagttgtaacttgtgttcaaggaaactgtatttcacttcttaatggccccaaagtgcaataatagtaatgctggcaatttggctatgccaagaagccataaagtccctcttttaagtgaaaaggtaaacactctcaacttaacaaatgaaagagaaaagatcatatgctgaaattactaagaacttcagtgtaagaatgtatcttctgtccatgaaattctgaacaatgtattgttataattattctattttgatagttattgttaatctcttactgggcctaatttataaaaattaaactttatcttgggtatgtatgtataggaaaaaacatagcatatattgggttcagtaatatccacggtttcaggcattcactgggagtcttgcaacatatcctcaatggataaagggggactactgtatgcgcaatatatgtatacgcttaaaaagagttttgtttagctagtgtgtgtaagaagattatcacaagtcacactgtagtgtttgccttttgccagtctgaatgttatcatcagtctaatattttatagcaaagatttaagttcattgaaaacttccctatggaaacacttccaatcaagacctacagcaagccatgaataaattaacatttaaacatgaaaactgatatttgaagaagaattagcaattaataatttctgctagaaaatggtggtttctcagccaatagctataaattgtataatatatgtaaaaggaaatatatacaaatatcatatgggacatatatcacatatactactaaaattgaaaattgctataaatagaagactatgttccaatgtccactgatttttttttttttaacaatctctagtcttgaaaatgccactatggtaattctgtcaaatttgtaatggttgggatttgatggtagtgcttttgaaacctgtattatctaatggaattgtcatttatattatatcattttcacctaaaagccaaatacaataagacttaaattatttttgctttttttgtggatagtcatttttgtgcccaaagggctaactgatgccttcagttatacatgaacaattcgcactaacgtcaggaagaacagtgtgcatataacctagggcagaatttggtctatggaatgtatcactcagtagtggaatggagattatgactttatttaaacatggacttgagtagttttatttttccttactgtttcccttggcatttctttctctaaagtgcaacattcaaaagtattctatgcagctgtagtgtcctggatgcataataagggcatatgttcaaggcaagtttaaatatccacataagccaaagacagagtaattaacattaaaaaaattaagacaacttttccaagaatgaaaagctttaatagattagctaattttagaattatttaacaacaactgtgaaaaattattagtatttacaaatatgtatatataaatatatgtaatgtcttatgttagacagcaatttcattctgctctctaatgattacatgacatacttctgaaaaaagtcaaacagtgtgttctagaaggacaaagaaataattggttcagttttgcttatacttagtgttcaattgttatcaacctggggtgggaggaagggaaagaaagagggaaggacagaagagagcaagaaaagaaggaaggaggagaggaaggagagatggaagtcatgtgacatagctagggatttggggcaaaattcaagacccatgttttccttgatggaaagccaaggaacctgagaaggagagtcagcccatgccaatttcactgtggtagaggtgaccaagaaagtttacattatggatgtatagtaggtaattttaggttgtttttgtctgggatataaacccattgtgttattccagttatttggccaaaatgttccatgcaaccattttggagtgctagcactttagggaatttataaaaaggggtggtgttcagtgtctgggttgaatacaaggtaggtagaaaaggacaatcaaaggaattagctgcaaatgagatgaaatctatgggaacatatattgagaaaactagtgaccattataatttaatcctctgaaatacctgcaacaatctgagaacaaggtaggtggcaagatgcatttataaatattaaagaaacacaagaccccatacactttgaaaactggggagtaccgaacttggagaggtctagtataggtagtgcttgttggtttgcatatttttaaaaccactttattgaggtctgattgacatagaaaagtctgtccatgttgcatgtatgcaacttaatgagtctaaagataaatatatgcccatgaaagtatcaccataatctgtggcataaacatatccacctatttgtttattcttaattaaactttttcctgagataattgtaggttcacaggcacttgtgagaaataatacagaagtcccatgtaccctttactcatttgttctcatcagtaacatcttttataactatggtacaatattacgaccaggatatggacattaatataaccaatattattcacatttcccatttttcatatattcctatgtgtatatgtttagatccatatgattttattaaaattttatccaccacagccgagttgcagaaaagttccatccctacaaggacacctcaagctgcctttttataaccatgcccactgtctcccttcccctactgctgccacaggtgtccctaacttctggcaaccactcacttgtactctatttctaaaatttggtcttttcaaaatgttgtatacatgacatcacacaatatgtactcttttgggattgtttctttcttttttactcaacataattccgtggggattcattcaagttgttaagggcattgatagtccaccttattgcagcatagcattccacggtatgtgggtaccatggtttgtttaacccttcacccattgaaggacatctaggttaattctagttttgggttgtatcaaacacagttaaagcattcgtgtggatgtttttgttaacatacatattcgtttctctggaataaatgctcaagagtgcaatagcgtatggcagttgcatgtgtgtgttttaagaaactcatttccagagtggctgttccattttagaatcccaccagtgatgtatgagtgctccagattgtgcacatcctttgtagcatttaaaataaaggctacatttattttactatttaaaataacattttagccattctgatagataatatatcactgtggttttattttgcatttctttaatgactaatggtgttcagcatattttcatgtgcttatttaccattcatatgtccaattcggtgatgtctccccatgtcttctgcccattttctaatttgattgcttatttgtagcttgctgtttttattctttttacagggttttgctgagattgattaggtccaatttatcaatctttcctcttatgtattgtgttttccatgtcaagtctatgaagtcttgcctaaccctaaatcctgagtattttttctaaaagattttttttattttatattgttaaatttaagtatgtgtttcaggccaggcatggtggctcatgcctgtaatccccacacgtcaggatgctgaggtgggtgaattgcttgagcccaggacttcgagaccagcctgggcaccttgtctttacgaaaaattggctgggcatggtgctgtgtgtctgtagttccacctatgggggaggctgaggtgggagaatcagttgagctctggagtttgagaccagcctgggcaccttttctttacaaaacattggctgggcatggtgctgtgtgtctgtagttccacctatgggggaggctgaggtgggagaatcagttgagctctggagtttgagaccagcctgggcaacttggtgaaacctcgtctctactaaaaatacaaaaacaattagccaggcatagtggagtgcacctgtagtcccaactgctcaggagctgaggaaggaagatcacctgacctcaggaagttgaggctgctgtgagcagagatcatgccactgcactccagcctgggcaacagagtgagaccctgtcttaaaaaaaaaaaaaaaaaaaaagcctatgtttcactttgagttaatatttttttaaggtgtgagatttggttttgagcagtggatgtccaaatagcccttagttgaaaaggctatatccttccttcactgaattgctttggcacatttgtcaaaaattagtagaagatatttatgttgatttatttcagaattctatgtatatccttccaccaattccacatgttcttgagtactgtgagctataatatctagtagagcgactccttctactttatcctgctatttcaattacaaaaaataataaaccttttagggcctatgattttccatataaatttcacaataagcttgttgatgttttcaaaatatcttgtttagattttgataggaattgcattatatctatagatggatttggagtgatttgaaatcttttactatattgagtcctctaatatataaacatggtgtaagtatcaccatttaggtcctcttttattggcattttgtaatttttagcacatacattgtattagtctgttctcaccctgctataaagatactaccagagactgggtaatttataaagaaaagaggtttaattgacttggtttcacatggctggggaggcctcaggaaacttacaatcatggtggaaggtgaagggaaagcaaggaccttcctcacgtggcgtcaggagagagaagagtgaggtgtgaaggggaaagatccccttattaagccatcagatctcgtgagaactcactcactatcatgagaacagcatgtgggaaactgcccccatgatctaatcacctcccgccaggtgcctccctagacacgtggggattatggggattatacagttcaagatgatatttgggtggagacacagccaaactatatcatacatcctgcacctgttttgttgagcttacccataaagtgtttcattttctttttggtgattgtaattggttttgtgttttaaattttggcttctgcatgattattgttggtatatagcaatgttatgaattttctagggtgatcttgtatttcaaaactttgctgaactcacatttatagtagttctggaaattctttatttgttggaattttctacatagacaatcatgacatctgaatttggagcagtttttttaatctttccaatatgtagtttttatttctttttccttactgcagtgactagaatttttagtagtatgttgaataagaaaggtaagagcagagattcttgctcttcttgttcctaatcttaggaagaaaaagagttcaactttcaccattaagtatgatgttagctgtagattgtttgggtaagtgttctttatcaaattaatgaagttcctctctattcctaatttcttggagttttgagtattaaatattgtcacaaggcattttctgattcaattgatatgattatatgatttttcttctttagtctattaatgtggttgattacactgattgattttcaattgttgaaccaaccttacatacctgaaataaatcctacttggtcatagtatacaattatagtatatgtagtatacaattccttttatatagtgctgaattgatttgctcttctttctctagtttcttgaggtagaaacttaatgttttaagatccttcctcttttctcatataagtattagatttagcttagtgttgtaatttaatgtgtaatttaatttagtatttaatttagtttagtgcaataaatttccccttccacgctgctttagcagcatctgacatattttattatgttgtatgtttgactcttggacaaaatgagggcttggggtattgactcccgatggagttaaaaatttgcatttaacttttgaccaccccaaaatgtaactactaatagcctactgttgaatggaagccttaccaataagataaatggtccattaacacatattttgcatgttatatgttttacgtgctgtattcttataattaaatagagaaagaaaacattgttaagataattataaggaagataaatatatatttactattcattaagtgggagtggatcattatataagtcttcatgctcattattttcacattgagtaggctgaggaggaggagaaagaagggttggccttgttgtctcaggtggcaaaggcagaagaaaatttgtatataagtgaatctgtgtagttcaaacctgtgttgttcaaaggtcagctatattttcatgtgcattcagttctatgtttttgaaatttcctttgaggttttcaaaattttcttttacaactttctttttgactcatgggttatatagagatgtattgtttagtttcaaataaattggagattttaaatattataattctgttattgatttcaaatttgaatcattttcaatcagagaacacattcagtgtgaattcagttctttaacatttgttcaggattttttaacaggccagaatgtagtctatcttggtgaaagtttcacaagtatttgaaattaatgtgtatagtttgttttgtgtttacacacgcacacaaacacagatgcatacacatataaatcttctgttatctttttatttctatttaaagaacttcttttagtcattatttaagagtaggtgtgaagaaaaccaattctcttataaatagaactaagtacatctactttgtatacttttcttgagtgattctatattgtaatgatgtcctttttactagttctatcaattgctgagagtttgctgttgacgtccctgatttaattgtgggcttatctatttctcctttcagctgtatcagtcttgcttcatgcatgttaaagttctgttgttaggtgcatacatgtttaggatcattaggtctttctagtggagatatcattttatcattatgtaatgtccctcttaacctctagatatttggtttgttctgaaatctatgctatttgatagttactagttattccttttttcttttgattaatgtttgcagatatatttttctgattactaatttcaactgacctgtgttgatgtccatgaagtgaatgttgtacagatagcatattttttggatacttttttaaaaattaagtttatattctaatacactctgctaatctctgtcatttatttgtatatttagaccatttacatctgagattcttactgatatgctagccttatgtgtgcaattttattttttctatttcttgtctgttgtgggtctctgcatttctcttttctgaccttgctgtaggttacgtgaacacattttaggattctatcttggtgttttaacagcattttgggtatatcttttttgtatagtgtttttagtggctctaggtattaaagtatatgtaagtcacttatctactgacatggacatattactacttccattaaagtgtacttttatttccacttaggtcctttactcattctaccttttcagtataattgtcttaagtgtttcccctacatacagtgagcatcacattacactgagttgtaatttttgcttcaaccgtgaaatattatctagcaaactaataagagggaaagtctaacttatttccccctaattttattcattctgatattcttattttctttataagttctgaagcttttattatcattttgtttctatttaaagaacttcctttagtcatcctttaagaatgggtttgatgaaaacaaatactcttatttttcactcatctgagagtgtcttgatttttccttcattccgaaaggatatttttgctggatataaaatttatgattgacagttaattgctttcattacttgataaatgttgtgccactccttctggcttctaatttttcagatgagaaatctgttgtcatttgaactggtatttacttataagttttacatcattcctctggctgctttcaaggttttctctttgcttgttttgtatttagcagtttaatagtgaaagccctagcatgagtttccttggttttatcctattgtatgagatttgctcagcttcttgcatgtgtttgttaatgtcttttgccatattttcagtattttcagacattctttcttgaatacattttcactgccattctctcctcttattctaggattccagttatacaaatgttaactcttttgtttttaactcactggttcttgaagctctcttcaagtttttttttttccttttaatctctcttttcttatttgttcaaattaggtaaattcttttgatttccttcaggttcaggaatcctgtcatcttcctgttacccttgaacccatatagcaagtttgagtttgtttcaatggttgtatgtttcagttatttagtttccgtttggatcttttatatatatatatatatatataacttctatttctatgctggggtttctctcattttttttcttgcttgaaagaattcacaattgcttgttgatgcatttttattgtatctggtttaaaatccttgcctgataattccaacatatgattcatatcactgatggcatctgttgatcttcttctttcattcaagttgttattttgatggttcttagtatgacaagtgatttttattatatcctggatgttttgggtatcgtagtatgagactctggatccaaattcatcttctttttttattcagaagctgtccttacattgaggtgtgcacagaggccaggtgggtgtgtatgttcattcatcaccccgttgtcactgccaacatcatccagcagaagtggagcactgactcacactgcagcagatgggtagggtgaaacttcagcttccctgttgaccccttcccagtgaaagcgggccgcctattgctgctgccttgttgcccctcatggtgacatattcctaactccccactgagccacggaagggaaaaattcattgcttgttcacactactttgttgctgcagggtaggggtggaagctgagcttcctgctggtctctgtgacaccaggggaggtggggaatggagtgtcaagtaaccctcctcctatcaccttattctgcctcattgatgccaggtgtgagagaaggttctgcttctctccagaactctcccagttcttgtgaactgggtccaattcacaagaaagggaaaaaggatgtagagtattgattggccctaacacctagcacacagtctcactaataccactgggagtaggggctcagctcccctctaggccctgctcacttagtgagggtggggtgggaacagaatggagactaaccctgacacacaccacctcatgtggtcttgtgctgtgaagagagtggagaggttcattccctccttggtcccactgacaccagaggttggagtaaagtaaagtgctgatgagccctgactctcgtgtccttgtttagtcttgttaatattgggtggatgttgagcttcagctcctgactggggccctgccagagccggggggaatgtaatgtgctgactagtcctgccttgcaccacttcactaagtcttgctgctaccaggtaggggtggtggagatggtttagctacttgctgggctgaggtgacactaacttagtaaagagttggagcatggctgactcctttcagacaggggatgaaagatcagccctctgctcactctgccaatactatttagaaaagagaatcagagtggcacaacttccactgagcagaggacagaaaataagctccttatttggtctcatcaaaaccacccctacctacagttagacagctgcctgtttcaacaagtggagaatggaagatcagctctctgtttggtttattggaaccaccaggcaaggggaattggaacactgactgcttctgccagtgggaatagaaggttagctgcctcttggccctgtcaacaccactgtgaaagggaatcaaaaactactgcttacttctgttgggtgagagggtggggtgaaagattagctccctgatgagctcggctgctggaactatgaatgtgtgtgagtgtgtgtggggagagagtgtgtgtgtgtgtatgggtgtgcttgtgtgtgtgtgtttggtttttccattggagtttggctaaagtatgacaggtactttttgctaaaaaggttttctcttgtaggccaacattttcctgatcttctgtctaggaaaataagcctttccttggagcttattttgtctgtgcctgttggtggttctacgttagatgtttctggatattaaaacaacaacgaaaactagggaatttgccatgttgttcctcaagtcctcagattcctaattttttttcttctacctacttcgcaaagtcatcttacacttatttgttttgttatgttcagggctttttaattatagaaagagaactgggaggaataaggctgctccatctctgtcaggatcagaagtcatgtagtgttataaaaaggactttgtctaccattttaaaatagctgttggctgtaagctccttattgtatttaaagtatattggctaaaattgtgggaggtaaggaaaactctttgtaaagtgaactgacatggtgaaaagagagagaagatatgcttgtcaaatattgcgaagtctattcagatcaagctagacatggtctgtattagtcagggttctccagaagaaaagaaccaataggaggtgcatgtctgtgtgtgtatgaaaaggaatgtattagggagaatttgctcacatcattataaaggcaatgtcccacgacaggctgtcagcaagctatagaatgatagaagccactagtatgtctcccaaggaaggtgatactatgtctcagtccaagtcccaaagcttcaaaaccagggaagctgacagtgcatcccatagtctaaggctgaaagcctgagaacccccagatcccccagagaccactgctgcaagtttcagggtccaaaggctaaagaacctagagtctgatgtctaaaggcaggaggaagaaagggcattctgcactggaagagaaagagagaggcagctcacaaagcaagaaaagcctgcaagctgaatatcccccttcttctgtctgctttactgtagacacacctgcagctgattggatggtacccacctacattgagggtaggtctttctctcagtccactggcttatatgtcaatctcctctggaaacaccgcaatagatacatcaagaaacagtgctttaccagccatctaggtatccctcaatccagtcaaattaatattaaccatcacatggcctattcacaatttaaaaatgtagcataaattgcagcagtggtcaagtgtattggcaagttgtaaagtgcctataagaaacctatacacgagcatttgcagattcccttaacacttttcagcaaatattttgttacaattgaaattaaaaggcagtttgaaattgttcctctactaaatatcacactggatatgaataaaataactagatagactaacaaggtacatactttattgcctgtgattattgcaactaccactcctggtggagagccattcttctcaggtgtgcaagtggaagattaattctcaatcaggaatatagatttgatacaaggaaagcatttcacttggcattagtgtgtcaacatttcagctaatttgcctaaccacaaatacttcagggggaagagaaattgctagtgctttatattaaacattggatggagctggcggagataatacaatttgtactttttttacatagtttcaacgaattttggcagatatgtctttttgaggcaactttagatgttgaaaagctgcttgtggatattcaagacttgtctttttttcatgttacaatgaccatcaccatagtttgtatctgattttttttgtgtgaattgaggaatgtggagtcataatgcaaaagtcattgccataattctttgcagatcttatgactggaaattcttgtgtatgtagtttgatattcatttgtaacacatgtaactggttcgtgtaatgattaaaataataagtaatgcttgatcatggttaaaataaataccaaggataaattcttctattaattagtgtaagcttatcctaattaacatctttaattatgggctgttgttaatttttgtcgcaacctattagatatactgtcctaaatcattaacactagtgtaactgagcataaactctaggtgactcacggctacagtggaagcgcccatggaaaatatatatttctaagtacacagtttagataatttcaagcagaatcagaaaattcttgatgaattctaaatttagtataaacagaaatgtattaggtttggttattgagccaagcttcaaacattgaatatcagaattgtgtccatttgcaatgagtaagcatttgattcaagatttttttttgtactcagactcatttttgtatatctttctgtttaagtcatattgtatttactgcgattacagattttttacatatttcttaaactggttctatgttatgccattatataacaggtgataaggaatgtactgtcactgccccttgacaatgaaaaggggacatctctactagtgtatgtgtatgtagctgtggaggagttgaaacagtgtaagtgaaatgcctagaaattgtcctgagttttgattttgtttgtgcttacatttttattagtatatgtactttcttgaatagataattgatttggggcaatatttctcaatcttggcactactgacattttggactggataattattggttgtgcctggctttcctgtgcattgtaggatgttcagaagaatctctggtctctacccactagatgccagtagcaaacctgccacctctctgcctacttccgtcctgtcttgcaatagtcaaaaatgtctgcagacattgccaagtgtcccctaaggggcatgagccttggtggagagaaacttctttacagtctcatccttggcgatgtcatttccttataatttgcgtagttaaacatttttgttttgaggagcataagttgtgataccatacctgtacagaagaggcttggatttaaggttaaccacatttaactgagagaattttatcaaagcatgaaataagaaaaataggggcaaaaaatgaaattctaaaatggcttatgcaatttctaagggtagctaataagaattctgaattggtgacattgtttttaaaaaaagtaaagcattaaaagaatttcaaagataaaatatattttttggagtgtgaacactgtaattaaggagacccaataatgttaagttacttaaaggatgtatttttacttaaagtaggatacaagttggagaaattaacattcggttgattgttaaatattttgattcaaagaaagaacatagaattgtcagcctcaaaaaatatgcttaagatagaaaaataattttggttgcatgaaaagaaaaagattttagtaaattgttgacttgaaaaggggaactatttgacagaagtctcaacagtgttttggagtggcatagtgattggggggtgacatcagatgattagagttaaaaacgactggaccggctgggcgcggtggctcacgcctgtaatcccagcactttgggaggccgaggcggctggatcacaaggtcaggagagcgagaccatcctggctaacacggtgaaaacccgtctctactaaaaatacaaaaaattagccgggcgtggtggcgggcgcctgtagtcccagctacttgggaggctgaggcaggagaatggcgtgaacccgggaggcggagcttgcagtgagcggagatcgcgccactgcactccagcctgggcgacagagcgagactctgtctcaaaaaaaaaaaaaaaagactggaccagttattaggccttaagttgatgtaaactatatgacaaattgacaatttagagacattgtggggacatttctatgaaacgtctgtttattattcattcctgtgatgattttgaaagggcaaataaaatcataatcacatattgtataatgctttttgtctttcaaatacatatacattaaaaatgacttatataaagcaaaatgtacctttttgtgcacaattctattggtttttgtggatgtatactgttgcataaccaccatccaaccaatacacagaagagttctataacttcagaatattcctttgtgctactcttttatagtcattcccatcttcccatccccaccctctattgacccgtaaactgttttctgaataaatatctgggaaaaggattgctgtgccacatggtaggtgtatgtttaaagtttctcagaagttgacagactttttccacggtggctgtaccattttgccttctcaccagcaaaatgtcagattacagttgttttgcatcctggccagcacttggtatggccacttcatttatttatttagctcttcttctgataggtgtttagtggtatctcattatggttttaatttacacttctctaatgattgatgattttccccggtgactgatgatgattgaggatcttttcaggtgcttatttgcctcccatgtgtgtatcctctttagtgaaatgtttgttcaaatcttcccatttcaaaaaatgttggcccttttcttattatgaaatttctatggctctttatgtcttgtgcatagaagtcctctgtcaaacagatgtctgttttgcaaatattttcctgatttgtagcttgtcttctcaatattttaacagtgtcatttatagatcagaagtttccaattcttcaggtctggctcccctccataatctgtttgctttgattcacttttcagcatcctcatgtagttgctttttgtgtttggtctgagattttacttgtgattggcagggagagataggctgaacgtgactgagtggagtatagcatgagaagacttgcataatattttttttaattttcagtgttttgcaaacattatttttgatccattaataatgttaatgattgccattttatatacgagaaaataaaaaaatcaagagtcataagagtttaagttcataaataataaaaagccacatggaaataaccagtgatctaaatcacctggaacaactaaaaccttaaggtattatatcctagtttgtgtgttccgaccacaagcccctagaatgcaaattacttatgtaccttatttaattatgtttgctttacgtaattttagtactttaggaacttccttgattaaatttcaattcatacatttgctgaaaaataactaattttaaaactaagtaaggttattaagtaacttttttccatctggaggagaattgtttttgttccagattctttactgacacaatagtagcacactcgaataagtgcatagtatgcttcatggaagatcatgtgtaaaagccaggcttagtcaatgtttcttctgataatacatgtgaaaagttgaaaagaacctttatggtcattttcctagtaagcaagtcaattccttttgcttaaagcattttaacttcattaatgtaaaagacaatagatatctactatgtatacaacactttttaagagatcttgaggttacagaagatagtaaagccatggtgtctatccttaagaagctatacataataagaaagaaagaaatctcactgtgatattgagtatacatttttggaaagtaatttttgaataaaatcagatgttttaaaaaatcgtaaaaggttttgaatcaacattttcaaatatttagaaaataaatgagaaaaaagacagacccaaccaattccttccagtaattttgctctgatattaatgtaattcccttcagcttttatgtgcatattatatatgttattaaccatagtacatctttaaaacatatataattttgtctgctcacttttttttaaaaaaacagcattgtatcacagtttattttcatgtaccttcatagttcaaggtacaagggaagtaacagagattccctgagagaagacaatggatgttcctaagaaagacctagtgtgagagttcagggaactgctacactttggattttttttttttttttttttttttttgagacggagtcttgctctgtcatccaggctggagtgcagtggcacgatctcagctcactgcaagctctgcctcttggggtcatgccattctcctgcctcagcctcccgggactacaggcgcctgccaccatgcccggctaatttgttttgtatttttagtagagacagggtttcaccgtgttagtcaggatggtcgggatttcctgaccttgtgatccacctgcctcagcttcccaaagtgctgggattacaggtgtgagccaccacacctggccaggattggttttttaaaataatgtagaatgttttgtatttgtccttgcatcatgtaaagatttatccttaaaagtgcaatttgtctttggactataaactctgcgagggacaggacagtacttacatagcatgttaaaaattcaagtatcaatctacccatttaggtctattggctctttactgagtccagggttttatttacatgtatcactgaatgaatggccttaagaaggtacagatgagactactgaggcatagagagatttaacagaggcaagcagagcatcacaagcagtttggaactcaacacatgtttcttgtttgaaaatatgcacagacaaaagagggatggatagaaagttggttcaatataggattaagacctggaacaaaagcacatgggcaccagcagaatctacttgagaggtcacagcgcccaaggggaaacaaccctaggcaagtcacttaacctcactcaccttagttctcttgttggtaaaatgcagagtttatgcaaactcaatacatgtcaagaaatatctgcaaggcattgtttaaaattgaccctctggatttttttcatgcatgcctggttattatttattaagatgtactaggggcaagtctcaaatggaagaaaaaataaaaggcacatctgcaaagtgaagaagtggggttaagcgcaatgcaacagaaactcttatactaatccaggaggactttacctgtcaatcaaatctatattcattttttttaaagattaataatggtttgttaactgagtaagctggcagatggtaaagtaatgtgatgagatcttggggcatctatgaccagttgatgactgactgaccaatttcaaaagatgctatgaaggatcataaagtttagttccatgtggattttgatgatagttgcatctatatttaaagccttctgtcactggaagcactcttggtgttgtcagactgtctattggactggatgagctgcaacttctcgcaattgaatgtcaataagaccaaagcaattttggttgattcatagcaccagcttaagcatattcacttgcacagattacatttgacagatagttaccttcagctgaactctgtggttagaggcttgggcgtattcttgacagtgagcttagagttgatgtctaatgtttatttcatatcctgtttttaccttccctaatattgcatgtgtaaatctatatttaaatatattcacagctgatgttcttgtcggtccacttgttatctctggacagaatgctgtaatgattcaatttaattattttaataaaaataacttgcacccctccagttttaatttcaataaatctgacgagtaatgattaattttaaggagtcttattgatgagcaattgcaacactataatgcaggaaaatgcccaagtggtgggagcatgcttacatctatagtaaacttaaaaccttcaaaatttggtgtgtgattatgaacaccgaggaaatatatccacatttatttaccaaattattattcctgtatcttttttaagttatttaggtccatcagttatcttcaaagtttaggtttgaaactatccatttcaagaatattagccttttaagatgattataatttaaataacatattctaaaatgttttaattgaacagtagaatgcatgtaacccaaaacattataaaatttaaaaagtcacggccatttttgaatatttagattgggaaaacacttaagatgtggttttatgttcaagaagaggtgcaattatggtatggattcattcatcattatggtattgtattgtcaacttttcagttatgttcaatttttaagatgctgggtgggaaatttaagggacatatagatctaataatctgagcctaaatctcctgctctatacaaataactctgcaaagctttggaatccctttatttgactaggtgaatggcagttttgtttgcatcagcctaaacctagcttggaaatcatgattttaaagcaaacacgttttcctcacacatttccatatttcctagaatctatggttttaagatatcaaacaattcaaattatgtagttatacatttcacacaggacaaaaactcatgctgaagtaggtaaaatatttttcaaaattattttctctacatttactggcatactttctctttcttactgtcttttaaaactgacagtcagttttttttatttttctcttttactgacagctagtaaatgtactgacagttcagaagcaagatgtaaatgtaagtcactattattttgttcacctgatacctgagcattagtagaaatgcatggctatattttaaaataaaaactagattatttccaatggttctgaagggaagatgtatagaaaaactgtcctctgtaaataaaaatgtgtttgaggcaagattgcattacatttagaaatagcatactttcctcattaggatgtgattggtatttgtactgaagaaaatgggctaattatttaagtaagatgtatatttactttctgtttcattagctgtaaatctttatagcatataaatctcctttagaaattaatgggaagtatataagtgagggaaagaaagcaggttatgaagttaataaataccatgttaaaaattagtttctacttaaatataaagttcaagattaaaaattaaaaattgttttattttaattagaaaaatcttgcttagttaatttctctggaagaaatgctatataagcagttaaatgtggagaattatattctattgataaaagtatgttgggccagactgaaccaacaacatcatagaaggactgattccttacttcctttaaaaagtgatctgtcatttgtctacattataaataacagctgagttttaaaacacaaggagatttttaaaaagtggcagcatttatttatttactgcttagacagtattcacagtattttatttcatccttaagactctttttttgttttgctcccacattattgttacacatatgggaattggtaaagtgggaaaacttagcatttatagatttttatactgaagcatgcgatgataaagtagtcactttcatccaagaaccttttcctcttttcacttacactagctcttccagaaatggcccctttagtgcctttaatggttttattctccttctgtcactatttttaatattcttattcttatactgccatcatatataactttgtgaaaatttgtcatataaggttaaaattgatttgcctttaaatacagtagtttccattttctgttaactgtttgaagaacacctattgagaggcaaggaaagacctgcgggataagttacaaaaggcaagaattcctcacagaaaaagcagcaggagcttccttgtcaagagcttcagcaagtagtgtcagcagcttagaagttgctattggactgctgagtgttatgcagataaattgtggctctagcttgtcctccgatgtcattctttgatttttctctgttaacactgcatttgcatttgggtctcactgagaacaaggaccagtgcaaatgccttatggcatgtgtagaaagctgcttttatgttaaaagtgatatgttttcttgttcactgtgttcacaacaaaaattcatcttccgagtcttggaattcccttatgtatttgtaattttccttccaagtcataatattcatatacaaagagtggaaatttttctttaaaaaaacctaccaaacaacaaaaacagtaaagttagttggttactagcagcaacaactgaaaagcagcatcaccaaaacatatgcaattcatgggtttccagcaaaagaggaaatctggaaagagaagatccttaagtattgctttaaagtgagcactgaaggacagccgttaaaacaatcccaatttttagaaaaggtattattccctgacatttacttgttttattcccttctcaatctgaagacacattttggacagatgctcttgtcttacatgaacattcaattcatttgagaaaataatggttatacttaaactcgtgaagtgaaatgtatggaagtctgttgctttataactttaaatagccatgtaacttgttcatggcagaatatagtcaagtcctgggcaaggactttttttctcttctccaataatgctattcaaggggaagctagttattgtgtgacacatgcttgattctcaggaggtttggacaaaagagagggttagaaggtcaggagagcctgacgctattcaactagatatttgagtagaattcccacaccagaattttgcctcatacctaattcagacagtgtaataatgggggaagggcagagagagggagggcagatggaggtgtcctttcaggttaaatgttaaaataagggtcttcatttctgtctctggtggcacagagcattaaaaaccctgtgacacattttggaagtgttgctataaaatagattttaacgtttgaggatctataaagggtattattgagtacttaatagattctgtgtttgcctactgaaatcactacaccgccgatatatacctcattaatttgtaaagcagtttggcccaacttgagacaatgtactgtattaaagcaaagtctatatcccaaattttcatggctaataattacaaaacgttcagcatctgaagaaaattatctaaatgtgacaatattggtcttggatagtttaacttgcgtgaaatatttcacacagaaacatttgatctatattgaagagttgtttcttttttcatcagatcagctatatcacagtaaattgtggaaatagaaaatggaaactaaattgttgaaaatgcatctgatagtttgtttttattgccaaaatgtcattgtccttgaggtccatcactttgtagcttagtaaaaacagatttaggcattgcaagtgagaagtcattgactgttttccttgtaaccaatttatttatcaagttggtaagtttcagaagtatttccagtgttcagcctatttcttcacttttctattttccaaattatatcctattacttcaaagatgtataaagttcacacattctggattctttatctcttttattgttttctgcttcatacaaagtaattaaattatgttcttgaagtaattcctcctatcttacttaaaatcaccttcatgatctgtcaagagttttcaagttgttctgtgataaagttcttagagtttgagaagctaaatggtggagttggtgcttaagctcttcactgaaagctgcaagagtataaacgaagtcagaaattactattattattatttttttctcattgagacggagtctcactctgtcgcccaggctggattgcagtggcgtgatctcagctcacggcaagctccgcctcccgggttcgctccattatcctgcctcagcctcccgagtggctgggactacaggtgcccgtcaccacgccaggctaattttttgtatttttagtagagacggggtttcactgtgttagccaggatggtctcgatctcctgaccttgtgatctgcctacctcagcctcccaaagtcccaaagtgctgagattacaggcatgagacaccacacccagcatatatatatatatatatatatatagttttttggtttttgttttttgtttgtttgtttgtttgtttgtttgtttgtttttttgagacgagtctcgctctgtcgcccaggctggagtgcagtggcaggatctcggctcactgcaagctctgcctcccgggttcatgcctcagcctcccgagtagcttggactacaggcgcccgccaccacgaccagcaaattttttgtatttttagtagagatggggtttcaccgtgttagccaggatggtctcaatctcctgaccttgtgatccgcctgccttagcctcccaaagtgctgggattacaggcatgagccactgcacccggcctgaaatgactattctttttaataacttctatttattgttttgtgttattcataattgttgtgcaatttaatttatttcactagtagaacactatgtacaggactgtactgtgtggaggttttagaagtgacaaaaccagttaactaggctcttggtccaaaggaatttagtgaaagagataagacataaacactaatgactgtaacatttatggaataataaataggagctgctgaaagttgtgatttcttctcattatgatagtgcttcttggattataaaaaatttaacctagaacatgaggtttcaagaggcagagatggggagagaagaattccaggtttgggactaggatgtagaaaggcagaaaggtgaaaatattcttgtgatgatggcaaacagtgactggtcaagtttgccaagagtaggttttatgcaagagcgtagtaagatgaaaccctgaaggaattttactgtcagatgatagaaaccggaataaagctgaggatacagttcaataatcaaagggaaccaaatgaaagttttgagcaaagaagggatcttattaaaacagccttttattatttcttttaagctagaggtagcttggcattatctgtgccagctcagagtgaccttcaccccaaaattctagttggattatggagcagttaatcttacaggctctaataattctgtcaccctttgttgtcattctatatctgtgtcccttcagttatgtgtcttctcccatattctcataccattatttctctgtctttcatttctttactttcatcatccacatcaggacaatgtttttattctatagtagtttgtaaacatgtcacattctttagactttcaagctctttgtcaacagtttttcaaagtccttgccttacataaacactaattctttccctttagggacccctttcctggcccttccaagcaaagggtgctcattcatccactcctcatgcacctcattgctgggagcaagtagagatgtagggattgctttcttctttttcttttacctcatattggaaagagatgtttcctttaaagctcatgttaagttgttgtgtacctttcttcaatttttgcatcaatttttgcaaaccttgcatcaatttttgcagctgctgacaccttggataccccagccacctgcctgccagatacaatgaaaaatttcacctctgactcacagtgtttctctgcatcattatcagcttttggttaatgaccatgaagcttcactttttcacctcttgaaaacttttggctacagaatgaagttaagcgcctaggtgcttatattgtctttgagtctgttgggttccttctaggttcagtttcttcacttctagcctagcccacaaggaaaatatctttagtagtcttttaaccattttcttttatttcattttttttcattctgttgccaccagacacctattctcaaatcattcacctgactgccttcttaattcctgtgtatagattgcagaatattactgaaaaaaaacaggtgtgtggattgaggccactaaaaattaatgatttccaactagagatggacccttagtgcagccttagggtaaatttcagaggtgcagctgattcaaagggtgtgcacaatttcaggggtatattgacctactgtcttcagaaaatgtttgactagtgcagactcctaccgaaagagaatcagagtgcctattcctcaaattattgttaatataaggaattatcttttctcatttttttctaattttatgggcaaaatagtatgagtgtattcttatttcatttagcatttcttcccctacctcgtacttatcttaccttacataggcttattagccagccacatgtattttttgcttctgggtaatagctgtgtattgttctcttatttttttaaataaaggggtctgcatttttattaatgactaagaaatcttgatatatttagaaattatatgtaaaaataattttaaattttttttattctactttaagttctggggtacacatgcagaacttgcaggtttatgtcatagttataaaaaaagaaagaaagcataggcagagaaggaaaatcactctggacagaaaaaaataattggttaaaatattaaagaataaaatttgtaggtaaaaataataaattttaaaatgacagtttaaaaatttatatgtaggctgggtgtggtgccccatgccgatagtcccagcactttgggaggcctacgcaggaggatcacttgagtccaggatttcaaggccaggttgggcaacatagcaagacgtcatctctacaaaaaaaaaaaaaaagaaagaaagaaagaaagaaaaaaaattagccaggcatggtggtgcatgcctgtagtcccagctactcagaaggctaagatgggaagatcttctgagcctgggaggtcaaggctgtgagccatggtcgtgccactgcactccagcctaggcaacagagccagatcctctcgcaaaacaaacaaacaaacaaattacatgtgaaaagaattatacgtgaagataataatttcagacatacaatcctatgttaactcccatagaaaattaagggagttatcacacctttgcttttaacaattctttctcttcccacattccagttttgttgaaataagcagagcttcttatcccagcttattgtagcaaaatcattatagtaaaatgatatttttatttcaagcattacaatagcactttataacttatttaaaaatttatatgatgttaaaaggattcaatactcattgagtatcctttcataacatacatctctaatttcttaatttgaattgagctttctatttggtgagagtatttctattctgaaaaggaacatggccagtgatgtaccttctgaatctttgcgtagttgagcctgtctttctaatgcctgtacccatgaacaatgtctggatgatgatggatttttttttcttataccctttcgtttgtgagcttttaatacattgcatcgtgtttctgaagagaaatctgagacaagcttaaggattatttttcactgtgggtgacccgtttttgtgtgcctgagtgagattcttacaggtttctttctttatccttaaaatcccaggactaccagcctatagtttggtgttaattaatctttgttttcttgagaatatggtaagcttttcttagctgaatattcaggtcatatttttaatcccttaattttggtttctatcatgtctttgagtttatattttcattatttgttttcttcgggctttcatcctgtgaaatttagtgaccaatatagttttattccttttatgtccaagatacataagaagttgtatgtactctagtgtccattcgttcatcaacttattccaattaccccaaacccctatttccaagggcttttcttcttccgttcagactctttatttgggtcttttcgtggttccttgcttaacactatgcacttttcacggcacacactttccctgggaattcttactcacaaccatgactcctagtactattttcatatgcatagttataaaacctgtaatttctaaatttatattgccacagtgctatcagtgagctttcaaaattcaaattcaagtatgatttttcttagttttaagatttcttcagttggaatggagacccttaatgacttagctctgacaactgttcagcctcatgttctgtaaggtctcctctgggacctcacattctagtaacactgagctgtctagtctttaattgtatccatctttcttatgttgctacaactgcacatgttctttaccaagaatactctcccttactatttattccgcttaatcctactttttcctttcactcatttggcatcaacattttcaggaagccttttcttatctcaaaatctgagtagacatgcactcatcctttctatgaaattatcgcaatttactcaatgtgctttatttgtgtccatcactagactccagaacttttagatcaagaattttaccttatttagtgttgttcccttcagggctcggcatcatgtttgaatgtgatccattctcaataaacaaagtttgattgaatgagtgatggcatcatccagtattagaacaaagttgataggacagtttgtttagaagctcttgcaagaatacagttgacccatgaactacaaggaattgaattgcccaggtctgcttttatgtgaattttttcgagctaaacacagattgaaaatacagtacttgcaggatgtaaaatccgactatgcacagggccgactttttgtatccctgggctccgcaaggctaactgcgagacttgggtatgattagattttggttatttatgcctggatcctggaaccaatcccttgaagactgtacagatgagagatattagttgatcgaatatgtagcaggagaaaactgaaaaaggaaaagaaatttatgaagtaaattaatgagaccgctgcatttcattactactttggagattagaggaacaataaaggtgactttaaaattttgaaccaacttctttataacatggcttacaagtggtagctagaaagaggagggttggttacttttgctttgtatattgcaatacatttctgattgttccctttccacttttccccctagtattgttgattactttgtctttgtaaaaaacttcatcgtgaaaatttctttctaaaatgtaaatgtgattacctccttcctctccttaaataaacactatgctcacgattgctcacactccagagaatgaaatttccttcccttagcaacatgttcaagatccttcaaaatttgttagatggtgcctctatagcttcattgtccttctatgtactttgagttttaaccatgatatttttttgcctcccaaaatcatgtactttgtggttttcatgcaagctcttcctgtttgccttattcagttgcttctagcttgtacacttttccctctccctcttcaactccatttctttgtgtacgtatctcaatgaccaccacaaatacaacttcctctgtaaaacacactaatttcttctctccttttctcctctctgctcctatagcacttttttttcttattggctgtatgacatttattacataggcatattttattagatattaagtaggttttgcattaggtatatttttgaatgtactgaaaggcagatactttattcattcatatgtgctcagaagagcaaaatatctcttacataatgtatgtttaatataagtaaatatacaaacaaatagaaatattgagtttggtaaaagatgatattgagaaaaagtgatatgtgatagaatgaaaagctacatatattttctaaatgatgggtggacatttacaactttgctaaattatatattaaatcatctctttatcctgaaaaaattatcttttccatgattagtaagtactttacagtctcttctaggttataaagctcagtactctaattagttttagaaaaactgtgactaaactagcagtactgttttttctcccatattttgtctcacactgaagtcagtgatatttttttctgttcacagatatattcactcttagccttccctgagctctattacagcctggaaaataactggaatttcctttaaaataatacacattttcttaacttatcatattaaatgaaaaacacacaaacactggcctcctttcacattccctagaactttttgttttttctgtatttggcatttctgatgtctttaattttttgtgattctggctctgtattctggtgcctggaacagtgttgcttccaaataaataggcagtagtgatagcaatactcataaatattttaagctatttggaaaaagatattttttagaagctgtgttttgaatgaccttcccatttaactacagtgaatttcattcttagttccttcccaatatctaccctcttgcatcttcttttatgttgtttctaacgtcttttgcggtacctatcaatttactgtcatctactgttttcattaagattgctacttgtagatcattaataaaaaggtgaaataaaactaaattccttatcaattctctccttaagtcaataagtatccagttttaaatgacagtgcttgaattcaagttcatattaaatgttacttcaaataagtttgggagtttacacatacatggctctttggttcaattacatttgtcttatttattttgttttctgttcccttgtagtattctttgataaacttgtcctttaaaatatatattccaactaaactctgcttagggcctaagtggtgtagccctctggggagggtcgcaaatgtaatttgtttgattggatactcaagcttttcaattgttttcttttccttagagaaatagaacctttctagctttcaggtcaattgatgtaatggttggattcagatggaatgacactttctccccattgtaagtctctagttcctcagagaaatccttgggaaatctgttgacaacttgctgtcatccagctgttctgatggtataaatgacttagacactgattcctggtagtttaaaagtctaatggaacagtgaaattttgagatctcaagtgcatcatgaataaagcacttaagtagcacttgtatatacttcttacaatttgttaactggttttctgctttttttttttgctggagaaagagatttacagttttaatctgattagacattagcagctggttgaagatgctattactgtgaagtatggaaaagaacacaatcatgatgaaaactttttactcaaatccttagaagaagaaagcagatgaaattagattggcaaaggaaaccagcccaaattacacacaggagagaaatgtagcagaggagagtactgagttggtgctgcacgcatagagcttacagcctccatgggcaggggacatgtgggtgtgactgccagggacaggaattgcaaacagcatttggagtgacagtctgggtcagcttctcatgctctttcccatcaccaggcatcagcgagtggaaagatttgacctgattttggagcacagagtgtgggctctaaggccacaggaaggcaggtgaatgggactaggatgtagtggagtccccatggctaaaaaataagttgtattgcatacctgcctttgccccacaattatcaaatccaatctagggtgaatagaaacacatctgcagacagatccaatgtccacctacaaaaagtttcagaaaatgaaaacagatggagaaaaaaaattataaaaatataaagaattctggtaaagttgccaaaagaaatgagtcttctagtcaaatgggctttgttctattagtagatgttgagacgaatgcagtgaattgattagagctgatgttatttgtttgggtgcatacatgtgtgcctggtgaggggtgggtgagggaagaaaaaaaactcaaacaaataagaaacatattgagagaaaaataatacctagagaattaaaatagtacactataacaaagtttgtgagtgattattaaggcttgtgtgggtattcgggggctctctgaggtgtcaatatgtaaactgagatctgacagtaaagactcagctaccttatatctcttcatccctacatcttgttctaagaaaacatcagaagtcctgtgatctcagcataagttgaaaactcgtaagtagtcattcaaaggtggatttgtggagggtagaggtaaactaccttgattatatttacatagaatggaagtgatgctaatttagaaatgtccattgctgtaagtcttaggagatgtaaagtaccaatgaaagatcctgaacagtattatgtgacagaaaatgagcgttacacttttaaaaaaatattagatgttgtaactttagtcattctcacctttaccttttaagtatttcaccatttaatatcaaccttcattattgatttatttctaaagatatctggaaatagtttaggctcattaattttctttttaagagtcaaatcggcatgcaaatgtttctcccaccaagaaatttttttcctggacttcaccttctgaggcatgtccacctttgaggcaagctaagccaggctttgtgaaggcagaaccatccgaagcacacagccccaccaaatttctctccctccttccctccctcccctgttcctctctccttctctttcttttttctctttctttctctttctttctctttctttcttccttccttcctttctttctttccttctttctttctttctttctttctttctttctttctttctttctttctttctttctttctttttatttctttccttctctttctttctttttatttctttccttctctttctttctttcttttttttttctttctctttcttctctcttcccccctcccctgctctcccctgctctcccctccccttccctttctttcagctgctgcttacctggggtaacatggtttgggaagaaacatgtcagaattggagtgaataaatataaatgataaaaagacaaaatgaatattattttcaagagtaattaccagtatgaagttcttcagatgataacaaaaactattgacttattttgtctaaatcaatgccactatcttatctgtgtgattgtgaagggaggaaaggaaactgttcactgaatattctgcatttgacccgtaaatacctacttttgtattcagggatgatatattcttaccttaaattaatgactgttttctactgttcttttttggtgcaaacaaattaaatgtgtgcacttctccatgactgattgtgcaaaaactgcttagacaattactatctctctagcttttgatcagaaaggactaccttgaaacaatggccacaataatggtattattctcaattctagaatttatttaaacaaacaattcaaatcatatttcataatacagttctctgaaggagcttaaagagattcagatttttccttttgtttaacatggctcttcatttagtttttgaggcatatttttaataaattttgctcagtactgtctactggagctgaaaaaatctaagaagacacaaaatggctgaagcataggtacttacagaaaagcatgcctttcttttaagaatataaaattaatacattatttatttattatataatgggatgttctacccttgttgaagattttagcagatataactcatgcacagtgtaagtgagcattcacccctgttttgtttatatggcaggactatttctacaaattttacaaattactgtttaggatctttatgacatccattgagtgctggcatgataaatgattttctatatatctgtctacatattgagggcctgattgatggcccttctgacttggggtcagcagtgagttcacatctcttggtatactttggcttattccctggaagtataaacagaaatccaatgaccactattttcattattttccttcaggcataatctgacctaatgatatgtaactgtattactgtgatttaagagatttttaaaaaactataaacattttgaggaaaagtgaaaatggtgattttaaatttaacacatttaaatattcattttatgaaaagaatatttgaaagaatagggatttatcaggatcaatagaaggcttggagtaacctaatcattttaaattttattccttcttgtttttttctgttttcccacaacttattcactaccctctatattctcatactttgctaaatcatattaatccttcaagagttggtttagatgaagcttcattcatttgataaagattaaatgagtgtccagtagttgctagctcaccttgttctgttgtgcttcacagacaatgtgttttatttttatttttattttatttttttacaaagtgaaggtttatggcaaccttgcttcaggcaaacatgtcatatattagtgctatttttccaacagcatgtgctcgttttgtgtatgcttcacattttggcaattctcacagaaatttaaatttttttccaatcattatagctgttatggtggtctgtgatcagtgatttttgatgttattataatttcagggggtgccatgaaccacaccaatatgatatggcaaagttaaccaataaatgttgtgtgtgttatgacttctccaccgacagaatgttcttctgacttgttccttctccttgggcctccctgttccctgagacacaacaatattgaaattaaattagaccgagtaataaccctacagtggcctctcagtgttcaagtgaaaggaagagtaacatttctctcacttgaaatcaaaagctagaaatgagtaagcttagtgaggaaggcatgtagaaagttgacaggttgaaagctagtcctcttgcaccaaacagccaagttgaatgcaaaggaaaatttcttgagggaaaattaaagtgctactctaatgaccacaaaaatgataaaaactgaaacagctttattgctgatgtggagaaaatttgagtggtctggatagaagatcagaccagctacaatattctcttaaaccaaagtctaatccagacaaggccctaactattccattatgtgaaggctgagagaagtgagcaagctacaaaagaaaagttggaagctagcagagattggttcacaaggtttaaggaaagaagtagtttccataacataaaagtgcaaggttgaaagagcaagtgctgttgtagaagttgcaagttatccagaagatctagataagatcactgatgaaggtggctacactaaacaacataatttcaatgtggatgaaaaagtcttctgttggaagaagatgccacctaggactttcatagctagagaagagaaatcaatgcctagtttcaaagctccaaaaataagactgagtctcttgttaggggctaatgcagttggggactttactgcacaggtggtaggtgccctaacccccatattgttaaagggtcaatggtttatagaaataatatagaagtaagtgtgtgattctatctaatctatctatctagtagtatctgtctatattcatattccctatatatccatagtccctacagccatccactgaggggagagagtgggcctgggagtagtaacactgaaatagcacgaatctacttagcaccgaatctttgttcctaaagaccactcatctcttagaggaaccaggattccttggagaaatggctgattccagggctgtggtggggaagtacaaaatgagcctagaacatcttgtgtcataaagtaagaagatacttaaagaattattagaacatgtcaatatgatccagaatgcagctgtatggggtctatactgtccaaacctggaacaacttgagcactgaaatacatattgagagtaattaattatatcccactgagtaaaatagagactcatgagtctatatagataaaaataagcctaagcatatattgaatttttaataagcaataggatatttatacagtcttgaagtatctgctcgcaaaatgtttgctaattgcaaaggggaaaattgtatttttacagtgtggaagcctggcagatatattaatgcaaatgattaaagttaacatcattaataatggaacaaatagaaatgatgtaagacatgataagatataatatgatcactgtatcacctgaatttaatcatgaggaaaaattagacaaacccaaattgagaggcaatctacaaaataactgggcggtcctctttaacagtattaagatcagaaaagccaaggaaagattgaagaactctttttttttttgggtcggcactgcttttttattttattttattattattatactttaagttttagggtacatgtgcacaatgtgcaggcttgttacatatgtatacacgtgccatgttggtgtgctgcacccatcaactcatgatttagcattaggtatatctctcaatgctatccctcccccctccccccaccccacaaaagtccccagtgtgtgatgttccccttcctgtgtccatgcgttctcattgttcaattcccacctatgagtgagaacatgcagtgtttggttttttgtccttgcgatagtttgctgagaatgatggtttccagtttcatccacgttcctacaaaggacatgaactcatcagtttttatggctgcatagtattccatggtgtatatgtgccacattttcttaatccagtctatcggtgttggacatttgggttggttctaaatctttgctattgtgaatagggccgcaataaacatacgtgtctctttcagatcaaaagaaaacttagagtcatgacaactaaaggcaacatgtgatttggggctggaggtgttttttctataaaagactttttggggtcattgacaaaacttgaatgggctttaaagataaaatggtaatgatatacgaataactttgatgtttacatcgtgcttatgtaaaagaatgtctttttgtagcaaatacacgttgcggtattcagggggaatgggtcattaggtcaaaaatttaatctcaaatgggtcagaaaaaattctttgtactactcttgtgactttcctgtaacgttgagatagttattttttaaagtaataaaaaacagaaactactgattgagctgcattacagatagaatgggaaaagagaaaatggacagaggaagtacaaacaacttacttgaggaacacctcaatagagagaagaagagtaacagggaaatatttggtggaggagacttccaagatattttcacgttctcatctttgttcctaaccactttattcatatttatttattatattgcctcctttcattgaaagtattttatacgccatttctattacagattgtaaattccttgaagaaaaggtctgtgctttatataccccttatgtgtagtatatgtagcatcacacttagcatatcataatgtgcttgtttcatattcaaacaacaggaccattttcaaacaagtgattggattttagtgagagtatgaagagcagttttctttataaacatgggagacaaaagaggttgactcacttttaaggagaggacattgtagttataacaagtaacttctagctcattgggatgtaacatgctgaaaaagttttctaaggtattttacagctaacttgataatcttttggaaatcatctgttctccatgagtaaaatagaaaaaggcacaatgatatattgaaataattaagagtatctaatattgtgatgaagtgtgcaccaaaagctttcttaaatgtagaagtgtacatgacacctctttaagcagtatctacaaaaaaccagctggaactctccctattccttaggaattcaataaatcagactgttggcagattttccatcatgtatatgtgtaaattaatagcttttttttggcagtagagagaagagagtaatctaaatgtgtaggaagaagaggccatgagagtttcacatccagtcaagataggacaaaaaaaaatctacttgcattcctatgttaaatttttaaagatcaattaaatggagacttgtttggtggaggttgcagtatatgaagagctttaatagagatgaggggagaacagcaaatccagagaatcatacccagggcacaaatgtaatacacgtaggctttttctgtagattgcttcaagagcctggcttggcttgtctgagttactcagagaggaaaaaatgaaagtgagtgtatatgttggtttggggtgtgtgaaggtgtgggaatggagagaagtggacagagggaaaatgtgttgaaataaaacaccaggagctcatggaaaatgcaaaacagaaacaaaaccaagaaaaaatctttgaggggcatacctgtgtatgaattcatttttccatagcacctttaacatagtcaaaacaaataaaatttaagcagttattcagtcaaactagtagcaggtgcacacacacattccaaacattacaaatatttgtgggccacccacctggttaatttctgccaaagcaactatccctgaataatttcctcaagtacttattcatattgtttgtataaacgtcactcaatagagaatatttaataaactggagcatttataattatataaaaattcatgtcagtaaacaaggccactctgaaaagttatgtgaagaatcacagtatgacacattttgttagaaaacggtgccttttctttattgcttagagttgtaacatcacatagttcatgttgttgttttcattttcggggtatcaattagttgatcaatcagttagtgtttattaagcttctgtccagcaggtaaagcatgctcatcaaatttgcaaatgacataaatgttagagggatggtaaaggcactgcatgacagacatagcatccaaaaagattttgacagctcggagcaataggctgaatctaacaagatgaaatataacatagataaatataaatgcctacctttgggtccacaaagccaactgtacatgtatagcattgagtagatgtgaattagctgttgatgtaagcaggaaaaaaaagacagtattttagttaatagtcagctcaacttaatttatcagttttagctgcatgatgtcattgccaaaaatctagcctgcaattttgaattgtattaaggtgacaatcctgtaccagtttgacaggtcagaccacatctagagattgtagtatttctggagccacattttaagaagagagacactaaaaactatgtcatatttagaacatcacagaaactaaacacatttatcctgaagaagacttaggagaggaatgacatccttctttacatttatgtaagctctcacatggaaaagggattaaatttgtttggtgcagtctcaataattagaactggaacttgtgaactgaagttataaggagatacctttgggttcaatcatttataataattacatataatagtaaaagctgttcagagagaaaggcgttcccaaaatctgcagaggcagaatactagcacagtttagcctgagtgtcctcctttgcaaagtggggacaacaccattgtgaagcagcgatctgggaaggcagtgggatgatatagggaaaatgttcagcacaatgaggggcatgtagtaagtaagtggttatagtacacaggggatgtcacctttcctattgtgggaggtggtgacaccaatcctgaatcatcactgggtagaggtatagaagagatgctaaatggatggatttgacaaactgactgttacttcaaaaccctaactgactgcaacttattaattaaatttgccatttaaaactgtctctgaaaccaccagtcacgcttctatagcaccttgagtatttttttttttttttttttttttttgagacagagtctggctctgttccccaagctggagtgcagtggcgcgatctcggctcaccacaacctccgcctcccgggtttagcaactctctgcttcagcctcccgagtagcccggattacaggctcgtgccaccatacccagctaatttttgtatttttagcagggacagggtttcaccatcttggccaggctggttttgaactctttacctctttacctacctcgtgatccacttacctctgcctcccaaactgctaggaatacaggcgtgagccaccgcaccaagctattctttttttcttttttttctttttttggatagagtctcactctgtcgcccaggctggagtgcagtggcgtgatgtcggctcaccgcaacctccacctccccggttcaagtaattatcctgcctcagcctcccaagtagctgtaattacaggaatgcaccaccacaactggctaatttttttgtatttttagtagagacggagtttcgccatgttggccaggctggtctagaacttttcacctcaagtgatccgcccacctcggcctcccaaagtgctgggattacaggcacgcgccattgtgcctggccaaatttttgttttcaatcctctgtgcttatttttaattatctttaaaatggagaaaaaggtaaacctgccttaggtaactgtaaagttaaaaagaatgaatatgcataaatattttagaacaatgtctgacatactttttttttttttttttttttggcagagtctcactctgtcacccaggctgtagtgcaatggcgccatcttggctcactgcaacctctgcctcccgggttcaaaagattctcccgcctcagcctcccgagtagctgggactacaggtgtgtgccaccacacccagctaatttttgtatatatatatattttttaagtacagacggggtttcactatgttggccaggctggtctcaaactcctgacctcatgatctgcctgcctcagcctcccaaagttctaggattagaggtgtgagcctccatgcccggcccatactagctttttaatatatgttaactacttttgtaatgccaaagtaggtggcaaaggattattggagaagagaggacttgagatgtgtgttttgaaaaatactaaaaatttagttaagtgcctatatggaaatagcttgaacacatcatgagattaagtggtgtgtgatcgtcagacagtgaggagactttaccagttagattggaggtcggctgttggtgaaggttagaaataaattgggtgagatgagtgaggaaaaatctcagaaggccttaggtttaggatggtaagcaataggatgggatgtgtggggattccacgtgttcgtaggtaggggaatacaacatacatgtgatttttaaaataaacttatagagttttcaggatacattgccttactttagcttaaaaattatggatggaatagtggaatctttttatgcaaatccttctttcacttagaaatagaaatttctatttcagggcaatttctatttcagaaagtccaagacttttctcctccataaagttttctcttctgattcatattacagtggttttctttttgtttgaatttcttagcattcaaaatgatgttccttatatttgtatcatccatcatgatcttttaaggggaaatttaaatttaagatacgttgtcaaatcgcttaatgttaatctattagaaaggtgttattctgaatgcataaaatggttttgctttaaatgaggccctccaaattaataaaactgctcttcctgggaagcttctaagttggttctgggaaagcaagtcacacagagaaggtccaaaaatacgttatacaccacatatattaacaaattaagacataatttctcaaagcaactccttggaaaagataatccttcttgactgcattaagattcagtatttaagttagaaacaaccatcatcatttatagtgattcaaacactatctagcatattaaaatgtattttgttgtcatcatacatacaagctccttgagagaaaggatcatgacttaactcttgttggtgtagctcatagggccactgtgggtaccgagttgatgctttatgaattcagtttaaattagaagaatgtaggcaatgggattaccatttgtccagtaacaaattcagcacaggtattctgtctctctatttcccagcctgagtcagcagtttcttttagttctgatggccagcaggagtaaaatagcagcaaagatctggcatttcagtggcacaggtgattgtggaaaattactataatctaggtggactcgattctattttccccttgctaggtactgagatattgtgtaactttctggacttttgaattatacttctcactaatctagcatgagaatgggtggatagtgtcaagaattctacttaaaaaaaaaaaaatctagtgtactcttgtactcaaagggatgagtacaatctatcacagggacacaaatgtgaccaaaaaagtggttaaaataaaatatgaaactgaagagaatgaagatttgagcatgaccttctctgtatcttctttccaaagtgttttcggatctcttatgaaggggatttaaaggcttttctacaactgctactgcttttgtcaattcattcattcaagacacaccaataaacatgcacgagctcctcttgtcctcatagggctagagaatgagataggtgcaaagtttattttagcagaaggctttcttttcacaaatcagaaattccattgtatgtattcccttaaataactggcaaggggaccatcggaatgagctatggcaaaaatccacctcagtctttacagcttcagggtgatggggccccagatcagaattgtaaaatagtttagagaatcttggaacataaaacatggtgcagaaaaaccaaggaagatttaatcttatgtatggaaaggtggttggtagtggagggggcaatggaagagagtggcttgggatcatcattaatcattatttaagtacctataaagtgaaaatatccttctggaattcactgcaagtgacactgaattcttctactaagcaaatatgtgatgagttgataaaaaagaaggtcctgaactcttgacaacagatataatacagtgaatacagaaaatcaaaaacatgctttctatctgactcaaaataaaggtgcacttaaacttgtaaaagacaacatttttatttgaatgatatgacagaagtgtcacgggagtgttacctgctataaagaaagcctaagaattattacctttattagaccagtgacactgagctttagccatacatttctaacttctgtccctctacagagacaattttcttttcttaaataaactgtcatgctagtgttaatatattgttggctctctcatgctctgagaatactgctgatataaaacatgtatatgttagattggtaatagtatctttagtgtagctgactagaacaaatgtgtttccctcatggctgtgctaatgtgataaaggaaaattggctgttcatcagcttttggctgggtaaagacagtagagatggaaccacattcttttttatgcattaataccactgagaacttttcactagttatatttcatgtgcctgcatgttgtgcaaagatgttgtaaaacatgagataatgctacaaataacaaagtagaaaagcctgtatcttttataatgataacagtcaaacaccaaatgacagtaacaggctgtaaaaaatgggatgcaaaaaaaatgcagccctactacccaacaaagcggaatatatccaggcccttgaggacttggtatatgatttgaggtatattaaagctttgttttaaaattaaatcaaatgcaacactagatcaatggatttaagaaagaacatagtttaaatgaaagtagggtggttagaatggagaaaagccattgtgggtaacttcttgaaataatccgtattaccaagtaattattgtagtaacttcctgttttttttgttttgttgtgttttgcttgtttttttggggggggacattgaaaaagatttttaaggcaatagtacacatgattttaagatgtttgagaataaatgtttatcttcattaattattgcaagtctttttaacataaaagcattaaaagtataaccagtttcaggctcacagcaaaactgagtggaaatttcagagatctcccaaacatgctgtacccccatgtacccacagcctccccctctattaaagccctgcaccagagtggtatatttgttacaattgccggacctacactgatacatcattaccactcaaagtccatagcagaatagcatgttgaatgttttgctatcattttaattaaaatgttaacatccaacctttcctttgcatgaccttaaatctcactctttcctcccctctctcaacccctcccctttccagagccttttatttgccatttcagctccttcactaattagagtaccaattattcctttttcatttaagctaaaagcacttgaacaaaaagactatttgcagagatgaagttgatgtccaaacagctgattagtttatttagaagtgtatgcaattaaaaattttgtgcaggtatctatgggtgttttccataaaagtttgatagcattggctattctgggctccagtcgcataaacaaaaatcccatagctttttaatcatgtaatccaagagttatcaagctacaacctgtgggtcaaattggctggccacctgtttttataaataaagttttatttggacacagccatgcccatttgtttatatattgtctgtggatgcttttgcattacagcattagagttgggcagttgtgacagtaaccatttggcccataaaaccaaaccatttgacttgcagagaaaaaaacattctctagctatttacagaaaaaaaaaattgctaatccctaatatgtgcagttattaggctacttgcttgattgattagtctagaatatgattggcaactttttgttaccctacattggaaaagtatatctgaaaatcaccaaccggataccaatacccaagacagtaaattcaagaaatatttgatcctagtaacttgaattatatccacatgcaattctttgttgttatatctggttttaattatttctttcccttgtactcattttgctctatttccaaatatagccataacaaatttaatttgtatttaaagaagtaacatatcctcaaaaaccctgtaaaacatggcaaccagagctgttacatgtatgggacaaactattatgtatacctgtgaacaccctgggagatatcatcacagcacaaaatgacactatataggtttatatctagataaacacatggagatatcactgagctattaaaataatgttttcagtcttcccagctgaacaaagtaaagaagaaagaaagttacttaataaaaactgctgaaatgtgtttaatataaaataaaagtttatgcacttaaactaataatggtggtaatttcttacaggtgcatcagacaaaaatcagcttctttatcaatggcgtggagaaggatcatacacctttcaatgcaagaactctaagtggttcaattacagattttgcatctggtactgtgcaaataggacagagtttaaatggtaagtttctgacttcagaatgttatttatttcatccaattacattgttcttaaaaatgcatcaaacaaataatattttaaaatatctacgtgtattcatcttctagggctactgaacaaattaccaccaactggatggcagattaatgaaagtaaaatttattttttcacagttttggaagctggaagtcagaaattaagggttcagtggtgttggttccttctggaggctctgagggcaaatctattccatgtctctcttcgtggtagctactggcaatccttagtgttcctttacttgctgcttcctaactgcaatcttgcctcagtcttcatgtggccttctcctctgaatcttctcccctttacctctgttataaggacacttgtcattggatttagggcccactcacagtcaggaggatctcaccctgagttccttaacttaattatacttgcaaagaccctttttccaaattaaagtcatagttacaggttccagatggataatagatcttttgggatctactatataacttactacatttgggaagctttcaaatataaacttctttattctgatcagtttttaagtaatttcaatgtgtaataaactatatttcctttctgtctcttttctgaggggtttgcattttcatgtagagaattgttaaagtagaactacgaagtattagatggaacctgagaaatagtattgacatgtaattaactggactgatgtttacatttactacattaaaaatgggccatatagtttaagaagatatcatatactatatattgaataaaaccagaagttgaaataagaaattatcttgaaatatctagtacagtggtctttaaaatgcctgcatattaaaataaaaatagtattttatattattatataatatatgctcattataaaaaaatctaaacaatatggaactctgtgaaatagaaagtattttccatatttctatcttcagagatagatataatttaacttttttatactcctacagatttttagtacatttttagctagagatatagttataaatacatttttccaaaaataaaattacaatacatatgcttcctctgagccttctaaaaataaatacttctccttcaaatgttataaacaacgtttcatgtcaatgtatcttctcatttagatatatgttctcatttaaaatggctgtattctatgcaattgtatagttgcaatccatgagatttcttaagctcctataatgaacatttaggtttttttaatgtttcagtgcaattagcagttattttatggaaaatattatatatatatccacatatatttatatatctgtgtctatatctacatttccatttatatatatcaaccatcaatctatcaatcatatacatagatgtatacatacgtacatatgtatttgagcagttgcctgattgcacagttccttaatatcctatttggtgccaacctgcgtgaattcatatcccatttcctcacttactagctatatggcctggcaagatattttaatatctctaaagtgtagtcaccccaactttaaaatgatgatgatgatgatcataatattgatttcccatagggccaatgtaaggatcaaatgaagcaatgtcatgtaaaacattactgtgtttcaagcacctggcatgtattagatattcaatatttatttgttaaatgaatgaatggatgaagtgctaagcacaatgcctgtatataaactatattttctctttcttgggcatggggctggattttaatgtacagcattgttaaagtaggactgtacagtattagatgaaaactgagaaataatattaacatataattaactggactatgtggtttatattttcgcacactaaaaattggccatgtagtttaagaagataacatatatgctatatattgaaaaaaattactaaactatatcagtaaataataataatattattattttattattatttttttttgacagggagtttcgctcttgtcgcccaggctggagtgcagtggtgcaatctcggctctctgcaacctctgtctcctgggttcaagtgattctcctgcctcagcctcctgagtagctgggattacagatgtgcaccaccacgcctaacttttgtatttttagtagagatggggtttcaccatgttggccaggctggtctcgaactcctggcctcaggtgatccacccaccttggcctctcaaagtgctgggattacaggcgtgagccaccgcaccctgccgtaaataatactattattaatgttattataattatttccaaaaaataaattcatagaagttgaatggctgggttgaagtatatggtcattttatattttaatacatattacagagattgctctaatgcataacaatgggctacctccagaaaggttgtgaaaatttataacctcattaaaatatatagccaagtacttgtttccttaaacactaactatccttacaaattatccacttttttttcacccttgacattcctctaagtgaaaaatattgttgaatgctgactcagaattatttggccattaatgagtttgagtagctttttacgtatgtcttgatcatttgcatttcatttatgaattccttattcatacaatgtgtccatatttatactctataattccttatttatttataaaaactcatttatgttaagaatattatgttgtataagttttcttcagttttttgatggcttatgaactttgtggtctagatattttaaagtaatcctttaatatttaagcaaaataaaacatgtatgcaagatagtgcataaatataaaaggtatagcttgatgagtttttaatatttatatacacctgtgtaactctcatttaaaaaaagtcgtagaatatttccagaatctcagagtcccctaatgaacatccactgtaaagataaaaacagaatagcatcaatgtagccctctataaccatagattaatgttgcctgttctcaaactatcatacaaataaaatcatgaagtaggtactcttttgtgttctttttgcttagcactatgccaatgagatttttccatagtgtatgcagttatatctttagctttagcaaataattctgtaaagttttccaaagtgggtgtcccaacaagcaacatttgaggatttcagttgttccacatccttatcaactgttagttttgccagatgttatcattctttgccattcttgtagccatgtagtgcatttcctgatcattagtgatactgagatcttttcatgtgcttatttgccaaatgaatatgcttttttgggaagccttttgccaagttttaattggacagtttgtatttttcttaataatttataggaggtcttccatattttgaatatgagttctttgacaaatacatgatagcaaatatggtcttctgggctaaggcttacagtcacattctcttgatggtatttgtcgataagcagatcttcttaattttaatgagtctaatttagtcattgttttatacttaatactttttgtgttctgtttagactatttttgcaaaccctgatatcacgaagatatcctcctacagtttattcaggaagctttattattttacttttcaaattttggtctatgttctatctggaatagattttttgaggttatataaggtaggggtcaaaatttttgtcccacctgaatgtgtaattaacctagaaaaccttgcctcttgaaacaaatcaatgtttctaccattctgcagtggtaacgttgtcgtgaatcaggtctctgtatatgtgaagatgggtttctttctgaactttctattctgccccagtgatctgtctgtctgtctatacttgggccaaaatatttagttttaattactgtaacttcatacatgtcttcatatctagtagttctccaactttttttcttttaagattgccttggctattatatatgaattttagaaacagtttttcaattttcataaaaaattctgttgagatttaaattactcatttgtatttaggagaatgggcatctgaacaatatcaagtatccagcccataaatgtaatatattccttgatttctcccagcaatgtttttagttgtctgtatagaggtctcactcctatttgttagacttgttcaaacatattcattggttttccttcttaatagactatttttttagagcaattttagagtcacagaaaaattgagtggaaagtatagagagttccagtatactctctgctcctacacacgcacagccttccccattgtcaatatccctcaccagagcggtatatggtatatttgttacaattgatgaacctacattgacacatcattatcacccacagtccatagtttacattaaagttcactcttggtgttgtacaacgacaagtatccactactccagtatcctacagagtagcttcactccctaaaaatcttctatgttcctcatattcatccttatctctatcctaacccctagcaatcactgatcttttcactgtctctgtattttcaccttttctagaatatcatatagttgggataaaaaaatcatgtatcctcagattggcttgtttcactgagtaatatgcatgtaagatttctccatgtctttcatggcttggtggttcatatcttcttagtactaaataatattccatggttagatatagcatagttgatttattcattcacctactgaaggacatcttggttgcttccaagttttggcaattatgagtaaagttgctataaacatcagtgtgtaggtttttgtgtgaacataagttttcaacttataaataccaaagagcgcaattactggatcgtatggtaagatatgtttagttttgtaagaaactgtaaaattgtcttccaaaatgactatatcgttttacattcctatcagcaatgaaagagagtccctgttgccccacatcctcaccagcatttggtattgtcagtgttctggctttttggcctgttggttttcatgcaattatacttagtattgtttttgaacttcatttgctaattttgttactattgcattaaaatctaatcagtttttatatttacctatgtttagtgaccttgccaaactcattattatgataggtacacaatcctatcatttgcacatatcaggaactcaactctttttgaatgtttgtaataaatgtatataatggacatgccataaatatctcctgtagatatttttgtctgatgcacttattaattctgaaataatataaaatgttattttgtttttctgtatgacctgagttattagaccaatgtctagttttaaaaaagaaggtatatatttttgatattcaaaacactgtggttaaattgccaagctctggtttaaatataacccaggtgtgcttctttgatcaaaatattaactctctttaagtctggtttctaatctattaaatggtggtttaatatataattcataggaatcttataagaattatgtgagatgatgtatgtttagaatataagttgcttgttgtatagtaaatgtgcattaagtggtaactatttttaaactctttgaacatcaattttcttattgtgaaacaataagatagggataacactatatttccatatgattgttgtaccaatcaaaagagaaaatatgaagaccgtattactttagtttgtgtatgctcttagatcaagctaaactcatgtgaagaagcaatattttaaggaacttatatatttaggaacttggtttgagtaattagtataatgcataatcttataaaatactctgcgtgaagaatttttaaataacacattaaatcttgtgagccttatttcaatatttaatccccattagtacttctaaaagtgttttattgcaccaaatgttgctcaaagtatttgatagcgccataaattagtcccctatgcactgcagggttaaaatggcttgcttctattctacttcagtatactaaatgttggattaatgcttcaaaagaacagtgtgaactgaagatgatatttttaaactgtgtagaaataaatttcactcctgattagaaaacatgtaacaggaaaccggtttatttcaaatattatttagttttcattacaactttctcctttatgttcttgacatctgagagctacagaaggaaaaggatattttaaataatttttatctttattctatcaatttatatgtacagtcgtacctactgtatcttttctctaattagagatggcgtatagactggctcattacttctgcctaatgagccaggctccatgccacctctctaatcagaaaagagataggtacagaatgttcctatggacttattataaatcattttctttctcttacttgctcctttttttaatcaaaaaattaagtcactgtcctccatacttttgtccatatccaagatggtttctttcaaaagaggtaattgtgcaagcgattactgagctgaattaaaggtgctctcatgcagtgccaggccggctgtctctgctttggaacagacactgcctcaaacacaagcacatcaaatgaaggcctatagcagatcaagatggatcttttctgtctttctctgattaggtttgacttggttctctgtttctgcacccagaaagtaacaaccttccatatgagtgttggctactacagagctttttctttgagtcttatctctagcataactctctagaaaaatgtgttgccagtgacactttctgttactgcaggacttgtctttgctttccctggaaaagtaatcaatggaccaaatgcatgctttttactgaaccctcatttatccttattaatggtataatctgatttgatcaggctgaattttatgtatacaaatagaaacaccttagaccatctatatcaaccaaagtgtgatggctcctttttagaacattttcttttagttgtagatttattttagtgcttccaattgggtatataacctggagcacttgtgttagcagatatgtagttatgaggagtcagcaatgtcatcgtggtaataaaccatactagctctccaaattttggatttaaaattacagaactacatgaatcaaaacttttcccagttatttctgaacttgtttatcaacagagttctagttgccgattaaaggtgagaatttctacattatacattcaaatgtgcatagcactttcttaagaagatcattggtcattaaggaatcaataaatatttgttgagtgtctgttaaagtgaatatgcagggaagaaaaggatcatcgtctaaagctaactcctacttgccttcctttctgtgttttcaacgttgtgtgtcttagcccatatgcttgtacttgattctaaagttggaatgctacttctaatttctaccagtttcccatgggttcacatttctaacctctgctagatacacaaactccattttagttcagctgaaatcatgctaatttttttcagagagaattatttttgggaattagatttaaaaaaagcttagaaagtattgaaattgactaagagattggaatggaagaagagtataggaatatagtatatagataggagtttacttagtttcagaacattgcagacaaggtatctagcaatattatcagacaagttatgttgtatatttaaaatgatgttaatgtagctctctcaaccatactaagtaaaaactgctgattaattaaaatttgaatgcaaaatatgcaatcataaggtagtagaggaaaatgaaggcaagtgtttctataattctagcatattaaggacctttattagcacgataccatgtccagaaacactaaaggaaaatattgaaacatctgactattaaactgggaatttaaaattcaaacaacgattatcattttgtacttgatagtttggcaaggactagaaaagcgattataccggtgttggaaatagtttggggtaacctggcaaactatcaaaagtaaaaatgcgaaaactacttaatccaagatttctacttccaggacactatctcgagaatataattagacaaagacttaaatacatactcaaaatgttcattgtagaatgatttaaagtaacaaataactggaatcagttaaaaacttcaaaaaggaattgatttaataaattataattcatgcctactgtggaatagtatacaccatcaagaggaatgaaatatgtctctttctatgtacatggcaatgggttcatgatgtgttattacatgaaacaaacaagattgtatagtacaaaattctataaatttaatgtatatgttataaacatacatatacatattaaagttctggaaggaaatatgccaaaatgttcttcagaatgttagtaatgttaatctctatgagtgggattgcaaataattgctttttaaatttctttttgtgcaatttttttcagtaaactataattttataataagaattaaaaatattttccaattttggacaaaataataaatggaagcattttcagaatagatttattctatgaatgtaacaagttcagccagagacacctaatttgtatagtacagagggtggtcttgaaaatgttagtcatttaaattctgtacttgtcacatggattcaggaaacacaagcgttcattggacatttaactcattgtacatacaattattattactataataatttgtgcctgagaagcaaagcatgagatttagaatcagacagatttgggtttgaatgctagttctgcttcttaacagccaagtgactttggcaaagaatataacttctcaatccaatttcctaatatgttttctcatttataaaatgtgttttatacacatacttttcagggtgatcagagagcttataaataacacatgtttgattcatgttaggtattcaataaaatttcgctatcataaatattattgttaatttagttattaagtttattgactgtgatacttaaaattttaacataatggccatgaccatatttaattttttttggctgaaaatcaaaatttacttagggtgagggagaaaaaaagtccagtttagattcattatgtagcagatattttaaaattctgtgttttgtctatgtaaaccccacaaaataatttctctctctttttaaagatctgtcctttctagtgttcttcaatgtttcctgttcatcctcacttccacctgatgctatttcttcttaatccgaagaacctcccttttcattgcttgtagctcagcctgctgaagcaaattctctcagcttgtgtaaaaatgtctttacttttgcaggatattttcatttgatatagaattctacattgattactgttacttcttttagaactttaaagatgttgtttccttgtcttcttgccttcattgtttctggtgagatatcagccactatttatataaatgttttcttgtatactatatgtttctttccttctttctttctttctttctttctttctttctttctttctttctttctttctttctttctttctttctttttgaagcagagtctttcactctgtcaacccaggctggagtgcagtggtgcgatcttggctcactgcaacatctgcctcctgggttcaagtaattctcatgcctcagcctcccgagtagctgagattacaggtgtatgccaccatgccaatttttgtattttcagtagagaccgtgtttcaccatgttggccaggctggtctcgaactcctgacctcagatgatccaccctcctcagcctcccaaagtgctgggattacaagtgtgagccaccatgcctggcctatatattgttttccacttgatgctgttaagattttatttttatctttcatgttatcagtttatgatatgcctaggaatgattttcattatatttgtcctgcttgaggtttgcttaaattcttggatatgtacgttggtgttttcattacatttggaagttctgatagttgtatcttcaaacttttctttctttttttcctttttttgcttccttttctttcttctgtaataagactctagttagattgatgttagagcactagatattgtcccatagatattgggtacagttttgtttgttcctttgttttcattttccccactcttttttgtgtttcagtttggatactttctatttgacttgtctttatttcactggtcaatttctcttttgtgtctaggctgctgctaagcccatctagcaaactgttgatttctaaattatacttttcatttcaagtattttcatttggccgttttgtagacttcatctattggctcaaattcacccatctatttgcatgtattattcactatcacccctagatcttttagcatttatattataggtattttcaaatccctatttgataattccaacatctgggccatgtctgcatctccttctattgactctttcctctctttacaaagggccacattgtgttgatttctcatgtgtcttaaatatttttattgtatgataaacactttgcgtaaaagaatgaaagaggtggaagtaaatcatattttttggcgtttttccctttacaaagaagagcactgctggttctatgagaccttttgaatgggggtgggcagtaggaaagaaaaaataccaaactgacttgaagttgatctgtacgtgggctttactacagttttaatattatttagctcactactggtttcagatatctgtggatagaattgaaaatagttagacacatgtctggtggggcctccttagaattctaatatgtcattctggcctctgtatggctgcttctttcttactccttctatgcctgaatcctctatttcttacctctgagctaagtatgggagtagccctgggtctcgtccaatgagttacatgtccagtaaatgtttgtgtttcctacaaaaggcttattactttctagaatttaattcatttagttttttctgtgcgctctacattttgattggttaaaaaataatgactttagggcttatctggcttgttttggttgttagattgacagcaaagtgatggtcccttacaactttttacatttaaagcagatgttgaactattataacaacatctaatttatacccctttttttctttggcacaactctgtctatacttaactctccaaccctctagattgtttcagctatggctggtcactgactctgaacaaaaaaggtgcatattacttggccccaaagattattttggtagaattcaggcatcgacgttttaattacctcctctaatttttcatggggattttcagcttttgtgggccctaatttatccctgactcttaacttttatatctgtttctttggtttgcctgaaatctgtttactgctaatatttaaaactgaaacatgtttttttataaatctagccattggatcttgtttcactaatgatcatgtggcatcgtttaatctcggtgcccccagcggctctgtttgttcagtttgtatagcacatgcatctcttgtgtttctttttctgtcagatacataatcatattgattagtgtataccccttataccctgagtccaaaaattcctcatccctcccgggatcttcaaatgatttaacgactttccactatctctcactttttgatgtggtctgttccctccttactcaacttaagtttcatggccagttattataaccacttcttttcatggaactggacttccctgccgttttttcttcacttctactatgatcttggcactaccacagcataggttaaatatacccaaagaggacgactcttcccaccttaaactcatgaccatgaacttcctatgtttcctgatgctgccctgtgatcattccatatttccctcattcattcactttcctgtcttatgccaactatttatacattttcctttctcattatcctgatcctcagtgattatattacctccaactttaccataaaaattaacaaaaagaataaaagagcttctatagatttccactgctatatttatccaccactggcataccacctattaatagatctgaccaagaatatcttgcctcatttttccccaatttactgctgtattgtaaaattttcttgtattaatggaacattttcaagggaataaaggcatgttgttatttttccatgaaaaattattcttgaccctcccccatttcttctactagccattgtcttatttatttgctctccttttagcaaaacttcaccaaagtatattcaaccataggagcctttaattcctcttttcaaattccaccatctacagtcagactttagctcaccactgcacttaagctacacttgtcaaatctctactcaccttcacattataaatctaatagttaatttcaagtctttatctttttgacctattaacatcatttaatggagttgatcgctccttcctccttggtatacgttcttcacttggcatctaacactccatcatctctctgagtttctagttgctgcgtctcagtttgatttactggttcctcttcatctacttgacctcttagtattggtaccccaagccttaagacttagctctgctcccgtgtctacagacactcactcccttaaagatcacctccagtcttatagctttaaatgtcatctaagtgacttgacctccaaatataaatctccccaccccagcctctttcctgaactccagacgactctgttacatgtatcaaactacccaaagtctccatttgaatgtttaatttacatttcaaaattaaacttactttttttcaaaatggaactggttttcttaagctctctcactttgatccatatactacttcttccatggtcttcctcatcacaagtgaaggcaatttcatttttccactaagacagagaaaaagatttggagtcatccttgtcaattctctttatctcatgttcaacatttttttttttgttttgcaaaatcttgttggtgttagaatcaaaatatatccagattttgaatccttcttagcacttccactagaatcatcccagtccaattcatggttgctgctttgccgggattactgcattgtcttttaactacttccaggcactccgctttattctcaacacagcagccataattgttctgttaaatatcagtcaagcatattacttctctgctcaaaatgctctattgtttctccattttaccagagtgaaaaccaccattcttactataacctacaagacctaactgagctaacagcagttacttctctggctttatttcttacatttgtttattttgttctccttgttttacacaaattggcctctttgccgatttttgactatgggaggtgcacttctgccttgataccattcgctgttctttcaacctggaacttttcacctcctgatatccatcaggctgactcccttacctgattaggtctgctcaataccagtttcttaaatacatctttcttatcaccccgtttacatctgcaaacaccacctccccactttgggtctcattatgttgctctattcttttccatagcacttagcatctttaatgtattatagaattgacttatttttgttgaatatatctgtttttccctctataatataaaagagaaagcaagattttttttatttgcattactcactgatataccccaggatccagaagattgcctatcacatggtagctactcaatacatattttccaagtaaatgaatcgatgggcagcttccatgcagcattaagcctgtgggtgtgtggaatgcaagaattgaagcttgggagcctctgcctagatttcagaggatgtacagaaaagcctgggtgtccaggcagtggcctgctgcaggggcataaccctcatggccctagaacctctattagggcagcgaaaaggggaaatgtggtgttgcagtctccactgagtcccctctaggacattgccttgtggaactgtgagaagagggccaccatactccagaacccagaatggtagccactggcagctttcaccctcagcaaggaaaaactgcaggcactcagtgccagcatatgagagcagccactggagctaagccctgcaaagtcagaggggtagagcttcccaaggccttgggagctcactcctcccaccaatgtgccctggatatgagacgtggagtcaaaggagattattttggagcactaaaatttgatgactgcccttttgggtttcagacttgcatgggggctgtagcctcttttgtttggctgatttatcccgtttggaatggaaatatttactcaatgcttgtatctgaattatactttggaggtaaataactgggttttgattttacaggctcataggtagaagggaattgccttgtctcagatgagactttggactttggagttaatgctggaatgagttaagactttgggagactgttgggaagggataattgtattttgcaacatgaaaatgacatgaaatttgggaggggccagaggcagaatgacatggtttggatctgtgtccccatgcatgttcagttgtaatccccagggtggaggtgatacctggtgggagatgattggattctggaggtggatttttcatgaatgatttattgtgatagtgaatgagttatcacaagatctggttattttaaagtgtgtggcacctcctcccactttgctcctgctttccacatgtgatgtacctgcttctccttcaccttctgccattattgtgggcttcctgaggcctctccagaagccaaacagatattagcactatccttcctgtaaagcatgcagaactatgagtcaactaaccctcttttctttctaaattacccagcctcaggtatttctttatagcaaagcaagaatagactaatacattatcctttgttactgatgtctaaaaatcttttttaaaaaaattaaaagcaagtatattaagacagtaaaggaataaaaaatggctactccataggcagagcagccccaaggactgctggttgcccatttttatggttttttcttgattatatgctgaataaggggtgggttgtttgttagttttccctgaaaggggtgggcaattcccagaattgaggatccctccctgttttaggccatatacggtaacttcctgatgttgacatggcatttgtaaactgtcatggtactgatgggagagtatcagtgaggacaaccagaggtcactcttattgccgtattggttttcgtgggttttagctggcttctttactgcaatctgttttatcagcaaggtctttatgacctgtgtcttgagccaacctcctatctcatcctgtgacttaggatgacttaccctcttgagaatgcagcccagtaggcctcagccttattttacggagcccctattcaagatggagttgctctggttcaaaagcccctgacaattaccccctcctttttaaaagaaagctcttaatcttaagagttgtagagggatgaagatccatcttctctaacttcttcaagctgaataggggtgatgatattcctgcctaacaattagggtctcttgtctttgggatagagaggaactcaatcagaaaatgctggtatgtcaaggtccattcagaatacttgagttctgacaaaagttgatacctggaagattaataagtatttaatttaagaaaacattcggtaagcttatcctacacaaagagtataacagcaatacattccgcagcagtaaagcaaaataaataaaattatcacaactaaactaaattagaagactttccatgaactgggcaattgttagaaccaagctaatatgtggttgctagtaaatcccagtatgtgcccagaattagaatattgatccagattttgacattgcccattcattttggttttttttgaatagtagtcagagatcacttggtggtacacagaaataagcagagtctgtctaaattacagaaaaaaaaccttaaacacaactaatgagactagaatctaataacaggtgtaccatagtttttgaagcaattctttttcttttcagtctctcatttttactaaagacaaattataatagaatcgatttgtgcgcaaaaatgagctttagtcttatacttggcctgattacttgtataaaatgctaaaaaataactatttttcacataggattttaaaattggctttgatggaactttgttccataaaaaggaatctcagataagacctttttaaagctgagcccagccctgggtttgtacaatcaaatacctatgagttgggttaattcctttactcttgaggtcctaagatatcttcgggcccctgagtctatcagaaagtgacattctttacttatcacaggtcaggaaccctgtacagggcatgtgtaaacaaagaatgtgaccagttttcccaaggggtttttattggctttataagtcaagattgattccttaaaggaaagcacaccattccagtgaaagtcttggtaaaataacaaatttttccaattgtgtcctgttacaaaataaaacagatgcttattgcacttatgcaaatatctattgtcataagttaagaatactcacaaatagtttctaaattctgaagaaattaggtagaatcaaatatgccccaaattttgtttacaggagtaaaatttactcaattgttaaaaagctgtaaatagcttaaaagaaaagttgccttggctctgatagcaaaacaaaggatcagcaacattttaagcaaaaagttttaaaagattacttcagctatctattattcagcccatgcagttaactcttgttcagcttgatattcatgaacatttcagctctccatcagtactgaaagttttatcctctcttctaatgtcacaatcttcaaagttattagaaacgtgcattcaagagcacctgtcaaaatcctatagctgactctaaacttactttttaaagaggattaaaacaggtcaacaattttctatggatgacaaaaagttttagaacgacatatattaaagccacaattgataaagaaattttggttagttctgtgacatacaatgattttactgacaattataactattactgataatgtacactaagtcatatcagaattacaggactttcccataattttggaacacaaaccaataacatatttttacaaatacagtccaaagaaagcaaagaccatttcatatttttctatgcttcctgtatgatatttataccaaataacctgaatatgccattttggactttaggccacctaatagctaagagattaattaggtcagaagaagacatactttgtaattttattttggaaagcttgtcaaatattaaaggtttaaaacactggatatcacaaaatataattccaggtcatcataagtcattcattaggccaaaataataactcaaaaatatttaaaggggaaaaacctttactcattaatagagggaagacttagatctccaaaccatctgtctcttttctttcctttcctatataaaatttcttttttagaaacaacctctttgcatagttgggaatatggctaattccacatgtccccaggccttatctagaatctaaagtctccaaagtaggtaaattgaacaattttcaaaagtcaaagaagcagtttctgaccttaaagcatttagtaaacttaatatgtgacctgcctaatttagaccaaatgtctttattttatcaataatttttaaagctgtttttatttcccaaacattcctaaagtcacatgaactaaaagtgattacactttttacttttctgacaaaatatttgatttagacacttattatttttaaaccgattaatcaaagctcttttatatcacatatgcagcacatataaatacacagacagaaaaagatccagtaagatttttcatttttcggtttcttaactggattactggcttcagggtggagccttagaggaacagagccaagaatgcgtgaaatttctaaagcctaataagcaggcacagctggaaggcaaactagatcttcaggaattaagggttccattttaatagcagattctggatcccaaaaagagggaattagcccatctcccatgggagtcttacctctcagtggggagtgggggcatttccataacttctaagtgaccaagagcatgcttctctgatccaaatgtgcaaagagccaagtattccataactgccattagccattctcaaaagtgtatttcctacctagttattgcataccaaagctctttcctaatgtaaagtgatttctgatacccccaaaagtaaaaaacatcagataacgcaatgcgaaacacaagacagccttagattttgagagggatctatccatttccaattcctgggatttcatgaggaaaacagatgttttttctcaaaatggggtctgtggtgctcctttttttcccaaggagtcccaggctgttagaacttaaatatctgcttttaattaagctgacttttaatggtactgctgtttttaaaaagtcctcttaaatttcttattacctgactttagccaggcgaaactgtcaataattctggcttttgaactttatcaaaggtaacctcccaggtgttcagagaaaggaaaattcaagacagaccattgaggggaagagaatcaacaaatgttcatgcgcatatcaaaccagaaaggactcattccctaagctgggaattgaaccctgaacctgggtcaccattgtgaaaagaaagcctcagctactgagctactcactgggcagtttccattgctcttcccagaaggagtctagagcagcagattttgagcttgcaaaggttttaaatgctcaagataattttgtagagctaactatgacatgaacccccaaattcctgttttctggatggtagagacctagagaaagtaccgccatgtggtcacaaggtcaagctcccaaggacataactagccagtttgctgggccgtcttgaacagtaggcttatggggtcctaagcttgtgttctatcctaaggtacccctctttctaacagaaatatacaggaagacaaattcacagtgcaaagtacaacagattcactgtagcttaaaactagcctcacaaatcctttttcacattaatcagaactttacagaggagataaacagtgatttttaccattctttgaactagtttgcacagagagaaagagagaggacagaagtctcactggtaagaaattcttacccttttgctggcatgccaggcttctgggttccctttccctgagcagtcctagtgacccagcttgacgcatcatagccctgggggccaagctgcaacacaaaggaaaattgtctttttttctgtcctggccagagcaaaatatgtgtgacatagacattagccactctgctcagcatccaatatcaaactaacaaggctcaaatttgcccctggttggaccctgtcatcattaatccaacctctgaccagaagtttcaacatgtggtctctgggcaagatggtcaccctgagtaagagaaaaggtaagaaagggaaaggagagaaagaaagaaaagcattggctgcatacagcagggtggggaaggcaaaataatcaaggataccagagaaagaccctcccattgcgcaaaagttcaggctgccgcttgaagggatctgtcatgaagggatcttttccagtagtcccattagctctcaaacatcccccttttgggaggaaaaagctccccaagtcccacattcacatgcatgcctaattatgtcacccacagccatcagcaaagagggcaaggcagattaacccaacgagaatagcagttaatatctcgtattgccaaacccattattagctgagagggactttactgagaggggcctgaaaccccctaaatcttaggaaggactctaaccttcttaagttgggccttgaatccatgttctgtcaagtgtccttgtcttttattaagaggggcctttaaccacctctgtcttaagagagactctaacgcccctaaattaggcctctaacccatttccatcctttacccaagcaaatgtaccccacttacccagagtcagccaataagtgctgaagtctatttcctttgggtcaggggagtctcctccgtgttgtcccttccatggttcaccagaaagatgttaccagaaagaggtccagatccagaccccaagagatacattaaaacaaagcaagttttccttttgaacttgtcaaaaattccatcttgtaaaggatattaaatgttgctttaagctgaaccttgagcaaattaggtggtttgtgtgaccatacatgtatgtggtggcttcttgtttgcaacttcaaggaacaagtattaatagttcagtgtatgatgttgatttgagttgagcatttgcagtttggataatcttaaattttgacagacactagctgtggagactctttctgttactaaatccttttgttttgaagctattgccattcgtctttctcttgtcctttatattttttgtctgtttctttaagcttttattggaaatgtgcataagtaaagaattacttgtgttacttgccaagcaatgcacatttcatagttttaaatctgtaatcagcaataaaaatcctaaaatatgtatctaagaacatcttaaaaaattctttctcactcaagaaagaattcaaggtgagtccatagagtaaagtgaaaccaagtttattaagaaagtaaaggaataaagaatggctactccgtgtagagcagcacccccaatgtctaaaaatcttaacaatgataataaaagcagaaaacatatggtaattttttggcataaaacccttactgcagtgagcattaaaaacaaataaactgctttggttcttcattctagagacatcatatttaaaaacttagatttcattatttgattttcattttgttacaaaataaaatattcttagtgtcacactaaacagagatcagataattaacctgaccccatgatgcataattttaattttaatttcaatttgagttcttaatagaaataatgaaaggctgttatcatattttggttgaatggacacagatctatttttttatggtaccacattgagaatttgtttttttacatatataaatctattaatggtattgtcaaaatactgtcttttttttttttttttaagatgtagtattgctttgtcgcccaggctggagtgcagtggcatgatcgtatcctagtgcagtctcaagtaatcctcctgtcatagcctactgcatagctgggagtacaggtgcacaccaccatgcctggctaatttttttttttttttttttgtagagatggttcttactatgttgtccagtccagtttgaagcaatcctcctacctcagccacccaaagcataggcatgaaccatcaagcccagctagtcttttaagctttgttgttttgaaaataatgaggattattactttgatatcatattagaattttttctaaaaatttaacaagaaattatctttagttctgtataatctgtgggcagctatatctatttataagcatctatgccaattattactttacttctagttgtaatttaaatttgttttagttttcaaggacacagctagtcttaataacttgatttgtttttatttccatttattgagtttagcatttataataacttaaaaaaaattttatttcactttaagttctgggatacttgtgcataacgtgaaagtttgttacataggtatatgcgtgccatggtgatttgctgcacctatcaacctgtcatctaggttttaagccccacatgccttaactgtttgtcctgatgctctctctcccctccccacacctgaaaggccctggtgtgtattgttcccctcccttcgtccatgtgttctcattgttcagctcccatttatgagtgagaacatgtggtgtttggttttctgtttctgtgttagtttgctaaggatgatggcttccagcttcatcagagtttctgcaaaagacatgatcttattcctttttatggctgcatagttttccttggtgtatatataccacattctctttatccagtctatcattgatgagaatttgggttggttccatgtctttgctattgtaaatagtgctgcagtaaacatatgtgtgcatgtgtctttctagtagaataatttatattcctttgggtatatgcccattaatgggattgctgggtcaaatagtatttctggttctgggtctttggggaatcaccacactgttttccataatggttcaactaatttacattcccaccaacagtgtaaaagtgttcctgtttctccacagtctcactagcgtgttgtttcttgactttttaataattgccactctgactgaaatgagatagtatctcatggttttgatttgcatttctctaatgatcagtgatgttaagctttttaaaaatgtttgttgactgcattaatgtcttcttttgagaagtgtctgttcatatcctttgcccactttttgatggggttgttttcttcttgtacatttgtttaagttccttgcagattctggatattagacctttgtcaggtggatgggttgcgaaaattttctcccattctgtaggttgcctactcaccctgatgatagtttcttctgttgtacaaaagctctttagtttaattagatcccatttggcaatttttgcttttgttgcaattgcttttggcatttttgacatgaaatctttgcctatgcctatgtcctgaatggtatcgcctaggttttcttctagggttttaatgattttgggttttgcaattaagtctttaatccatcttgagtcaatttttgtgtaaggtgtaaggaaaggttccagtttcagtattctgcataaggctagccagttttcccagcaccatttataaaatagggaatcttttccccattgcttgtttttgtacagcttgtcaaagatcagatggttgtagaagtgtggtgttatttctgaggtctctgacctgttccattggtctatatgtctgttttggtaccagtaccatgctgttttggttactgtagacttgtagtatagtttgaagacaggtagcatgatgcctccagctacgttctttttgcttaggattgtcttggctatatggactctttgttatttccatatgaaatttaaattagttttttctaattctgtgaagaaagtcaatggtagtttgatgggaataggactgaatctataaattactttgcgtggtgtggccattttcatgttattgattcttcctatccatgacgatggaatgtttttccatttgtttatttcttctcttatttccttgagcagtggtttgtagttctccttgaggagctccttcacgtcccttgttagctgtattcctaggtattttactctctttgtagcaattgtgaatgggagttcattcatgatttggttctctgcttgtctatttttggtgtatagaaatgcttgtgatctttgcacattgattttgtatcctgagactttgctgaagtcgtttatcagcttaaggaattttggggctgaaacaatggcgttttctaaatatagaatcatgtcgcctgcaaacagagacaatttgacttcctctcttcctgtttgaataccctttatttctttctcttgcctgattgccctggccagaacttccaatactatcttgaataggaatgatgaaagaagggatccttgtcttgtgccagttttcaaagggaatgcttccagcttttgcccattcagtataatattggctgtgggtttgtcataaatagctcttattattttgagatatgttccatcaatacctagtttattgagagttttaacaagaaggggtgttgaattttattgaagcccttttctacatctatcgagatgatcacgtgattttgtcattggttctgtttatgtgatagattacgtttattgattgtgtatgttgaaccacccttgcatcccagggatgaagccagcttggtcgtggtggataaggatatgctgctggatttggtttgtcagtattttattgaggattttcgtattagtgttcatcagggatgttggcctgaagttttccttcttttttttttttttgtcatgtctctgccaggttttttgtatcaggatgatgctggcctcataaaatgagttagggaggaattcctcgttttcaattttttggaatagtttcaaaaggaatggtaccagctcctctttgtacctctggtagaattcagctgtgaatctgtctagtcctgtgctttttttggttggtaggctattaattactgcctcaatttcagaactcattattcgtctattcagggattcgacttttcctggtttagccttgggaaggtttatgtgtccaggaatttatccatttcttctagattttctagtttatttgtgtagaggtatctatactattctctgatggtagtttgtatttctgtggggtcagtggtgttatcccctttgtcattttttatgtgtctatttgattcttctctcttttcttctttattagtctagctagcagtctattttgtttgtttgtttgtttgttttcaaaaaaaacagctcctggattcattgattttttgaagggtttttcgtgtctctctctccttcagttctgctctgatcttagttgtttcttgtcttttcctagatttttttatttgtttgctcttgcttctctagttcttttaattgtgacactagagtgtcaattcgagatctttctagctttctgatatgggtatttagtgctataaatttccctcttaacactgccttagctgtgttccagagattctggtatgttgtttctttgctctcattagtttcaaagaacttcttgatgtctgctttaatttcattatttacccaggagtcgttcaggagtaggttgttcaatttccatgtagttgtgtggttttgagtgagttttttaatcttaactctaatttgattgcattgtggtctgagaaactgttataatttcagttcttttgcatttgctgaggagtgtttactaataactttttaaaatatcagtgatttttccaggtaatagacatttatggctttgaaatttcaaagtatgtttaaacaaaaaaattcatcaacaacctcctcccacattctgcatttacatttatcattatcatgtgtgttcttatacttttattattagattgaaaaatatacaattgccattcttatagattaaaaatggtcaaacattggctatttcaaatagttcaatatgtaagtatctcaaaataatataacacatgctgttatctttatgttgttagtatttatgtaagtgctcatatatatatatgcacatatataaaaatacagagtatatcttcaatttgcctttttcataaataatttttctgagaattacccattttgatattttgttcattcattttagtttctctattagtattccactttataaaaaaaagtatggattatgtatttgtttccatgtggagagttagcttttctctttatataatttatagaagattgcaattaatattttgtatgtctccttgtgtgcatttgtgagaatttgcacagaaaaagcacagtgaaaggtatcataggcttcttaagtattcttatcttccattttgatatatcgccaaactgttatctaaagtggttgaaccaatttgccttcctatggcaacaggtaaaatacccatttgcctgtgttatcaacatgttttgttttccaacatttttgccaaaatcatgagtataaaatactcccttattttcgttttaattttaatttctttagtaactattaaaatattgaaacatatggcatttgagttttcgcctctgtgaattgcttgttctggtatatctttcattaaattttccattgcatttccttgtcagtaaaagttacacttataatctgcattttacatgttttaattatattgattgtaaaaatatttccttcagtggtttgacttttaaaattttttgtatttttggtctgtcacacaagagttttaaattttaacattggcgaatatatcagttactttttatggttcagatagttttatatcttacttaagaaattctcttttatcatgatatatattgccttctattttttctgaaattaatttttgtataatgtgtgaggtagagatttaattttaacttatctttattggcacattcttgtcccactgatttttattgaacacacattatttcctcactgatttttaaagccacctctactgtatctcaagctccaatttgatggtagtgtgtttaacatcttgtttcagaggtcaatttgattaacttcttgccaaaagctatagcacttgattatcttttgatatcttgcagtggattccttcttaccagccttcttcagctattgttaggtcttactcctccaaatgaattttaggatcagtttatataaaaatgtttattgagattttttattggaattgaattaaatttatacaacagcttagggataatttatattgttatgctgatttttttcatccatgatcatagtatatcattctatttatttagatcttcttttatgtcttttagtaaatttctataaataaaatactcataacttataataaaagggataaatataaaatttattcctaggtatctcaaggttttggtgctattgtaaatagtatcttttattaaattgcattttatatttattgctgatataaagaaatattataaattgttatatatcattcttatttccaacaccattttggaacacattaattcgaatatttgactatagatttatttgaattgttgaggtagaaaaccatgtaatttgcaaataatatatttatgtcattctaattcttatggattttacttcttttctttgtctgattgtgaggtctagacattcctttaacaatcttggaaaaaaaagcagtgagagcaagcatcctcaacttgtcattgctttaatggaaatggctttacattttttcctttaaataagatgtttgccatatcacgttaaaaactttcccacctattcctaattgtttagggttttctacttgtatattatgtatttttcaagacatggcagatttaatttgttgagatataattttcatgcctatgctaccaagtgagattggtcctgtcgttttcctttctcttaatgtccttgagaacatgtttcagctctcccatttatgacctgttttaccttgggcaaatttcttaatatctatatgcttcagtttcctcatctttaaaattagcatcaaaagaatatctttccatagtgtttttatgaggattaaataaaataatatacataaagcacacagaacagggcctgctactcagtatgcaatagttattagctgtcattgtcatcattaatattaagatattttaaaacacttttcccctaaaatacttagagtactttgatgcatatcctaagatctgtctctggctgctatttctggacatttctttgttgtaatatttctggtagctcttacttgtgactgtgaattgtagacatttgatgcccacagactattcagctctttcaacttctaccttgttcctaaggaaatctgaatcaattcatcagggtctttcctaaagaaatttgtcgaagttatccaatccaatgccacgattatatttcttcttgtatgattgtgtttttgttgtttgtcaaagaaatttttgcccaagtcaaggtcacaaagaattttcctgtaattttttctagctatattatagttttaggttagttctattatccatattgagttaaacttttacataaggtgcatgatatgttttcaggtgctttaaaaaacataagatatccaatattccaggaccgttcttggaaagaagagtattctttttccatttaattttctttgccacttagttaaaatacagtggactgtgtatgattttattatcagcattttcattgctactgaaatgcagtaggtatgcaattgattttcatgtattgatattgcaacttgcaactttgctgaactcatttataattcctaatagattttagtagatttcttagagttttctatgtacaagagatagttttacttctactttttcaatatggaaagatttatttcttctgcttgcctatttgccctgtctggtaactacagaaaaatgttgactagaagtggcaaaagtggacattgttatcttgttcctgatcttagggaaaaagcattttttcaccactaaatatgatgttagctgttggtttttcacagataccctttattagatgaggaagttgtcttctttaatagttagttgctttttaaaaattttatcatgaagtgttaactttgactatgtagctattaagatgatcatgacgtttttgtcctttatttttccaagtttgtgtattacttgattacttttcgtacattgaaccagccttgcatccttgtgataattccacttgctcatgatgtatgatcctttttgttagtactgtatttggttcactagaattttgttgaagacttttgcatctgtattcataaggcatattggcctatagttttcttttgatgtctttgatgtttttggtattagggtaatactggtttcatagagtaatttggagagtgtttcttcctcttctattttttggaagggcttgtgaagtaatggtgctacttcttctttaaatgtttggtagaattcgccaatgaaagcatctggtcctaagcttttctttgtggaaatttttaaaaaattactaatttgatctcttttagtggtatagatctattcagattgctaatttcttcttaagtcagtttacatagtttgtgtgtttcttggaatttgtctattttatctaggttgtctaatttttggcatacagttgttcatagtatcccttatgatccttttttgtgactgcaaagtcagttgtaatttcccttttttaattcctgattttaatcattagagtcatctcttttcttggctagtctagttgaatgtttgtcaaatttgttaataatttctaacaatcaacttttgttgtttttcttgttgtttttctattctctattttatttgtctgctcaaatctttataatttcctttcttctgctagctttaggttgagtttgtttttctttttctagtttcttaaggtagaagattaggttattgatttaataaatttctctttaaatataagtgtttacagctctaaatatcactttaaacactacttaaatcccataaagtgtgatatgttgcatgttcacttccattaatctcaaaggatttttaaatctttttgtaatttcttctttgatcattagttattaggaatgggttaattttcacacatttgttaattttacaaatttgcttctgttattgatttctaattttttctattgtgatccaagaatatactttgcatgatctcagttattttaaatttatagagacttgttttatggcctaacatataatctatcctggagaatgtaccatatgcacttgagaagagtttgtattctgttgttgttgggtggagtgttctgttggtgtctattaagtctaattggtttataaagtcattcaggtcttccatttctgtttgtattctgtgtagttgctctctccatgattgaaagtaggatattgaagtctccactattgttgttaaatggtgaatttttctctttaaatctttaaatttgtcattttactgttgttagacacatacatgattataattgttttattttcctgatggattgatatcttaaaatattcttgtctctactaaaaattttgtctaaagtctattttgtctgatgttagcataggagctcaagctctcttttggttattgtttacgtggtgtatctttcttttcattcttgaacattcaatctatttgtttcctcgaatgtagagtttgtctcttgcagaactcctatagggggtcatgtttgtttgtttttccattttgtaaatatctactttttgattgaagtgcttaagccatttacatttagcacagtgactgataaggtagttacaatgtcactttgctgttggttttttaaaatatgatttatgtcttctaaatttctctattctttcactgtcttctttgggttaaaaagttatcttctagtgtataatttaatacccttgtcatttattctactatgtttgttgcccaggatgttatcattaacatcttaattcataaaaatctaattcaaattaataccaacttaattttaagagtatgcaaaattttgcacctatatagtttttgttcactctgctttcttttgtgccgttattgtctatggagattttttacattggatgcccatcaacacagatatataattattgctttataaagtcatcttttaaaacaaatgtgagagagaaaaagaattacagtaaaaatacatttataatctttttaaatatttacctatttaattacctttacaggtactctttatttcttcatctggattacattgctctctaatatcctatcatatcagccagaaggacttcttttggtatttcttgtagagcaagtctgatagtgataaaacctctcaatatttctttatctggaaatgtcaatttatcctgcatttttgaaggagagttttgctagaaaaaatagtttttggtgtacagtttttttttacgactttaaatatgtcattcttctcccttctggacgccatggtttcttcacaagaaatctgtggttaatcttattgaagatcccatgtaggagatggccttttctcacttgctgctttcaagattttctctttgtctttgtctttcaacagtttgatttttaatgtgcctagggtgtggatctatttgaatttatcccacttgcagttcattgagcttcttggatgcatagattaatagttttcatcaaattttggaagtttttggtaattatttctctaaatattctttcagtccttttacctcttctctgaaactcccattatgcctatgctggtactcttgatggcgtcccacagctttctggggctttgttaatttctcaacattctttctctttctattgctcacactgaataatctcaattgacctgtattcaagttcattaattatttcttctgatcatttagatctgctagtgagctcctctagtgaatttttcatttgaaagttttctattttctatttattttttctttttttgatgaaatgaggtctcactacgtttcccagggtggtctcaaactgctgggctcgtgatcctcccacctcagcctcccaaagtgctgggattacaggcatgagccaccatgcctggctaaaaattttctatttcttttctcatattctatattgtctaaagcatcattgtcatactttgctttagttctttggacactttgttttgttttgtttttagttatttgaacatatataaaatagttgatttaaagtctttgtctggtaagtttaatgtatgagcttacaattgacccatttccattgcccatttttcttcccctgtatattgtttgtaggagtttctttgcatatgccatattctttgttgaaaaccagacattttaaacacatagtgtagcaaatctggaaatcagattatttccctttccagagttgttttgttgctgctatttgtcactattactactgtttgcttgtttagtggctttcctgagctaattctgtgaagtctgtttctttgtcatatgtgataaatgaagtcattgtttgctcatcttagtagtcaggcaatgactgaacagagaatttcttaaatgcctagaaccaatacattttccagtctctggtgagagatctgtacgcatgttgcagaatgccatcaacactgaggcagtttaacactctcctttagtccccacttcctgcttgtgcagagcctcaaagtcgagctgaggtgagaccttaggactttctcaggtctttctttagcatgcgcatatacctgagcacatacttagccttttgcatgttcataatcttgtagattcgcaggcattttttaaggatttgcaaagcgtttatggacatgatgtttcacatcttctccttttaagtattttggattgtttgttgtttcttctgactgttgttactgcctgggtcaactgcaatgttaagcagttgccagtgattatttttagcaaataattgttttaaacaaacagagtaaatgctgtttccagtggatgaactctgagtcaattcaagccttactagtggggctttccatggtacttccaggcagatcgaataatgacaatcatctgaggatagagctttgaaacagctccactcccattctgatcctctagcagtaactaggctgctggttttcaccctgattgcaaactgttcattttcagggcttccagagagtggcagagaggagtacgggaataggaaagctaaaatgccatagaacatgttgttcttaccaatattcagtcatttaaaaaataaacactgtccacattgttgcaagtctttgctttatttccagagttctcaataagttgatgtgatattctttgccagtgttcccattgcttttatggaagacagactcttccattgttttcactctgccattgctgatgtccttttattcgtttcctcaatgtcttatagtttttacctatatacattgccttgctttaatagatttataactaatatttcacattttcagtgctaataaaatagtatttaaaagttttaatttccattggttaatcactagtatatagaaattaaattattactcatttaacttctatcaaacaaaattaactaattcacttgttatttctaatagcttttatgtacagtcatggaaattttctgagtagataattatgctatctgcaaatgagagtttatttctttccttctgattgttgtgacatttgttacttagccttattatctgtttttaccctgatttatatgttggattacttagttttcccatttgactaattttgttgtgccacccagttgtaatgcataacaacttctttccagtcatcacctgtctattttctgactagacagctatgaggtctttcttgtatgagtcatgtctatttccttgatcaatttatataatttagacatatctttgccatatgaatatttttcaaagaagaatttttatggaatgtttatcccaatgaatatctgttgttaaaaaattggcaagtagcaaaggaataagtaaaatttatttctatggctgtccttgaaatatttgatagtattctcacctcaaatcataattcttttatttgggatggatgattcacattaactctaggtctttagaaaacttgctgtaactcttttttatgaagaatttcttcaaatatgaattctttagcaatggatatgattgcaagctccaaaatttaaaactaaaatggtttttaaaggttataaaacccagcccctttattttatagataataaaatagatttcattatccccctgcagcagagcttccctttagctattattaaaatatagggagtgaattctaatttatcagcattgaaaggtacacctccacttctaataccctggtctgactgccaacatttttcacacatatgactgtaatatcctcctaactggcctcttggcttctactcttatcttcctatattctagtctcagaacttttgaataatcctgagatcacatcactcctcttctcaaaaccctccaatggcttcccattttactcagaccagaaatcaaatttcttacagtaggctattagactttgtatatataacaatttgtacctccatcctcccctctcccccagccagctacttgtctgacctaaccttctaataacctccccccttttattctgctccaggatgctagctccttgcacctcctctaacatgccaagcatactgatttagaggtctatgtgcttattaatgcctgcctggaacattttgcccctagatatacgtatgactcattcccattcccctgtcaatgccacattctcaatgaggcctctcttggacataacatccccactaaaatctagccatgctctccaacctgctctaatccttctgtttttcataaaatgtattgcattctaatatactatatgaatttctcattcattatgtttatctacgtgaatgcaagctccataaaagcaagggtattttgttgttgttgttaactgattgtacttttggcactcgtgaaagtgcctggcacataataggcttccaataaatacttgtgaatgaatcaatacgtaaaagaatgaagccaccctgacatttaaagccatggttcaggctttagcaacatcacagtgttcatcagttttgctgtctttcagttatggtaagtctttcaaaattatgaatggctagcccctgtttgttatgatctgggttctttgagataaaacacttccctagaggttatataaaatattttagacaatattttatcctgagaaagcaaattggataacatgaaatgcaggtaatttctttttttctccttgatatctcattatgttggcaaaaataggaaatgaagactgtcagttttccacggctgccatgcaaaagtactgcaaactgggtggcttctcccagaaagagaatgcctaggactatagcggggcacagaaagttccccacaaggagtatttcaaagctgagacattaggggctgtatgaggcagaaaaattggaagcagaggcaaaatgggaaccttagggctgagagagcctgaaggttgtggggcattaaaaattcatgctgtagattaacagtgtggggtgtaaaggatgctaggagaggaagaactgagcatggttagggatagttgaaggtaaagaaaaaacgggacacaggcccagcttccttgacaacattatctcttacctcataaataaaatttatgctatgaggagtgactttcctattcgtctttcctattccccaaataaaagcataggcacacaatggctttgctgtatttgcatgtattcttctcatctttcttctaagaatgacatgtccatctttctaccattccctctttgtttaactttagatcctggatccaggtcaattgatcataaatcatgttgcctggatggccaattaactgaaagaatattttaccatgttttcttatttcttgtaactaattataaattttagaacaatttgtgttggaaatcttctaaagatttctgcaaagttttagtagatttagttttgtcttcataacaccacttggaggaataattctttgcacttgtgccagctgcctgttttaggatagatagagtagagaaactctccctacgggaaagtcagagcaggaggctgcctagagcacatcttcttgtgggcctcagctcatggggtatgtggaagactgagactaatgggtagaaagagagagcctataagtgtatttttcttagactacatcagctgagaatacactaatgaagaaatatttttatatgtaatattttggttattttctcaaatatattatttaatataaatataacatgtaaatatatgaatatacacaaatatatgcatacacacactcacacacagacacatactctttttaggctcctaagtctcacactttgcttgtgagtttcttcctgattctgagatcactatctcagactacttcgtgtgctaattctcctctccatgttttatttatcagccatatcctcactctgtcccagtttcctccaagcaaccaccaaggagcagcagaaaacataaatcaaacattctttaaaactctatcaagacagagtgaaaactgaatagttaaaagaaaaaacacattgggaaaatggtcatttgatgattaaaattgctccaattttatttttttagaactattgaaataaacaattattgaaataaattttgttattaaaaatataacaaaaaacttggagtcggtagtttttctgctttattctgtctccactctcttgggcttatttgtctcagtaagttctgaaaaaatatttgccaaacaaataaaataataccatgtggattaaggttgatagctacatttgccttgaaaggtcacctaattcaaagtagattggtctttgaacctggttttcttagaagattttccctgaggcaataaaattctgagagtgaactatgatactattgatatatgtgaatgacacagaacctacaagtaggaagtcttcgatgagtcctcatttggagattttctagaacagacattaatttaactttagagagaacccaaacagatagcctggagcttggagctataacaggtgggatgtgagagtgaggaatcttccttttggcattgcaaatactctggaaattgcaatcagaagcagatgacaatcaaatttagggctgatgagataatatatctatggagttataaactagagagaaatttgacttgggaagggacttctggagaaagccatgagttcgatcagtaaataggctggccaaagtattcactttgacttaagtcctacagtgtccatggagataactatgattatttttgttattaatgtggaattagcaaactagagattgatctgtaaaagtttcaaagggcagtgacataaatatctttttaaccttaacatcttcaaaggaatatcacttaaatacttgtcaggtattgcttggtaaacagagacttcttatattatgcacatgtgtgtatttgcaggtttagagcagtttgtcggaagaatgcaagattttcgattataccaagtggcacttacaaacaggtaagcagatgttgcattgtaaacctcaagaaccgaaaggataaatgctgaattcacttaaataagaatactatgtagattataccattttttatctttataccatttggcaaacttcacctaattaatgtttacagtgtttgctttggcttagtctatggttgttattcactagtgctactcttgaggaactccttgtaatatgaaattgatcacatttttcctaaggatattctgtaagaaaacttgatatttgaacattttataaaacttgggatacaatgcttaaattttctatatgaggtagtttctattaacaatacttgagaaacttctacatctgccttttttaaattggtttgttgactttatacctactagagaatgtagaacaataaacgtgattaattattttgatacatgggaaattctcaagagactgatctattagacttggagacaagaagaatgagcatttgaagtattgtgatatatttttctattttcagtgaacaaataattatatagactcaggctagctttaatgacattatttccttatcttgagagtagatgggaaatctttcttagggcttcttaaaagcacacagaattttaaaaaatttaagtgaaattctgcttaggatgcctttgaactttcttcttcagcttatgatatcatggtataatagtatattgttgtatggatgagttgatcttatttacttctattaaaaatcaaaaagaagaatgttcattcatatttcttcaaggcagatataaattagtgtggtgggtttccaaatgagaagactagcccttgtaaatttagaagcattgcttttgatgtggttcttagtccatggcagatcattaacaatataaacattctttcttaccaggctatataatcaaggtatgcctcagtaaagggtgccatggccctggaacacagtgttaggtgtatttactgccaaaagccttactatattttagatcacctttgtctaaaatgctgaagggcaatgttgtagtaattctttgggaataaagtttttccttgggagtgaaagattttatactggattctatactggtagcttttggtcccattcaaaacttggtatcagttgaaaagaattgatgagatttaaagaaggtatgacttcatgtgatttaatgaatggaaaagctgcctgactccttcactgctccactggggtctgagaggaaaagcctggtttctctggtaagaccttgattactaattttggcctacctgaaatgtctgggaaggtgctatgtggaagaatgcctataaatagaatgactaattctggtctagaacaagtatattgcccctaatggaaaaattaaatatatctacctggaattggcattctttgactgttggcagccgccatatgatctgaagccaatgaagcattacaggatgtcaggatctgtactgatgagtcacaggaaaccattgacaaatggccttggcctcagtccttcacttaaaacagaagcagataaaatgatacttgctttcgtacttctttcccatggatgaactgaaaacattatctataactctcattgttctccatatattattgttcactctcagtagttagtttagcatcctaagtaaatgtgatcatttctatattatcacaaatagacacggtaaaatattgtggtatttaaataagtatcttaataatcagacaagggcttatgcatgcttcttgatataaataaaaagttaatattaaaatgtgtgggttttgatatacattttatgataatgaatttgtttatttggccaaaaataagttttattttatgtttcatgcatcaaattattaaaactaaatggatactcatgaaagcactaaacgagtgacattcatttgtaacgactcctagaagttctattactgttaagctctttgtccttacagtctccctcttgactcccacagagagattctggaagtcttctctggagatcttctcagattgcatgcccaatcacattgccgttgccctggcagccacccgcgggtccaccctttggcacagcggtactgcattcctaatgatgcaggagacacagctgataatagagtgtcacggttgaatcctgaagcccatcctctctcttttgtcaatgataatgatgttggtacttcatgggtttcaaatgtgtttacaaacattacacagcttaatcaaggagtgactatttcagttgatttggaaaatggacagtatcaggtaatgagaaacgataaggtgtacattaatttcctgtggttattgcaacaaatgcccacaaacttcatgtcttaaaacaacagaaatatattccctaacagttctggagatcagaaatatgaaatcaacatgttggcagggctacattcccttaaagattccagaggaggatccctccttgccatttgcagctcctggtggcccttggtgttacttggcttgtggcaccacaacttcaatctctgcctccattttcacatggtgtccttccttgtttctctgtgagcatcaattatcccttttctttctcttatataaggcccaccctattagacccaggatgatctcatattgacatccttaattatactgcaaagaccctatttacaaataaagtcacatttacaggtttggacagtagtacttggacatatctatttgggaacacaattcaacccactacaaggtgaaaactgaactaggcaattgaaccttgcctcaataaagtagtgtattataatgtatacaataaaaatatctaaaagacaacatgtaggaccttatgtttgagatttgtatcaaaatgatatttatgaaatgttgaaaataattatttttattaagtagcaaaaattaatacaaactaaggtgctttttctaaattaagaagtctctatatatgacatttatttcatagaagtaatgttctttgtttatgtctttatttgcatgttgatttataaaatccttgagcaaatgaacagatacacaattatagaatatgttgcttttaccacagggctatgaagtttctggatgtctaatacatatttgataactataattatgatgaagtgagccaatatatttgaatctaataattccatggtttgatatatactgatggttaaacttaaaactttaattacattaattaactttccattttcaggtgttttatattatcattcagttctttagtccacaaccaacggaaataaggattcaaaggaagaaggaaaatagtttagattgggaggactggcaatattttgccaggaattgtggtgcttttggaatgaaaaacaatggagatttggaaaaacctgattctgtcaactgtcttcagctttccaagtatgaatatttttaaacaattaatttaatagactgattggttattaataatgtacaagtatgctagctctctaggctggtggagacttcccttcaccaccaacttccttgaggcagattctcctaagtcttatccctaaattgggcttaaaactatgtttaaagttcttgtaaaagacattagagtgactcttatttcaatctcactgatgtttcacaatctgattttcagattgtttggcaagttatctatgtaaatagaattttcattatgttttcaaggaactgttttagtgtggctttctatgataatcctgtattgtttatatatgaaatatatggaatatgcttttcctagaatgaataatttaagcttttattgatactgtgtagtaatttctcaacattttgatttctgttttgccaaaaatgtgaatagattttcatgacatcgaatttctttcattaacagttttactccatattcccgtggcaatgtcacatttagcatcctgacacctggaccaaattatcgtcctggatacaataacttctataataccccatctcttcaagagttcgtaaaagccacgcaaataaggtttcattttcatgggcagtactatacaactgagactgctgttaacctcagacacagatattatgcagtggacgaaatcaccattagtgggaggtattattatgaattttgttttcaacaaggtttttgtcatacttactgtcttaacagcacattaagatgtcagagcaagccagatttcaagctttacattttgaaatgatttcatactctaagattttaggggaagatctgtatgtgagtcttttctctatataacattgttatatatatatatatatatatatataaaacgtattttataaataaatatatatatatttatatatacaggaattgattttcaaaagctgttgcttttagaagctatgatactctgaatctgacttagaagtgatttatccaatattttacttgatttgttctggaatataattttcaaatattctcaaaagcaaagagatggagctgaatttggagttgtaactatagcaccagagagtttttaagtacagatcttgatctacctgagttcatagtgcacagttccatgggtaatacttgtttttctttagtggaaagatctgatatgccctaagtagtttataaatgtctgatcataattgagaacatgactcacaatatttaaaaagaaatgacagctgcaaacctaggcagcatactgtctaatatagaaatgtacatatagagtatatttagaatggattgttctggaggaatgataggccttgtgaataaaatatgtctttaaaagcagaccaaaataccagtatataagcattgtttgtttgctaagtcatagcataatgaacaaagcaatactattaaatattcatcatctaactttggaaaaaaaaataaaaaaattgaaatatgttaactgcattctgcagtttattgtcaactttatattcttttttctttcttttttttttttttttgacaggcttttgctctgtcacccaggctggcatgcaatggcatgatcatggctcgttgcaacctcgacttctgggcctcaagtgatcctctcatctcagcctccaaagtaactgggactacaggcatgtgccaccatgcccagctgattttttttttcactttttgtagagatggggttttgccatgttgctcaggctgctctcaaactcctgacctcaagtgatctacccgcctgagtctcccaacatgctgagattacaggcgtgagccaccgtgctcagcctgaactttatattcttaactgtattttaaatagtgtagtaaatgccttcccttggtacgtggttggtatagatataaaaaattccatttccctttagaggttggcttgaaaattatctttacaatacacgggtttggatattggtgacagtccttctgacatttccagataaattaaaaacgtgtatggatatccacacgattaaggagaaactgattttgtatcaattaaatatacaaaaatcttccctgttaaattcacataatgcatatagtcctaggaccttaaatatattcacagttgagttggtgttccttaggagtgtgtgatgctcatgtttgcagatgtcagtgccatggtcatgccgataactgcgacacaacaagccagccatatagatgcctctgctcccaggagagcttcactgaaggacttcatgtgagttctattttatgcatggaaatctaaaaaaaaaatagtagagatggtgactataaattctatgaacttaatcttggcctaacaaatgaaaataaatttaaaaactgatatgaacttaaaatgtcaattattgcagattttttaagaaaaataacagccatcaattaagttgaaattgtagtttttaaaaataatttcagccagagaaattacaactgaaaccaaaccctaaggttcttttctcttttgtttttctttctttgtttcatcagcattatcatgttttataaaacaatttttaatgtgtttggatagcatggcactaaacaaaaaatagtttgattcttactaaagggtatttatacaaaagtatcaataaacaaaagcatcgttagatgaagaacaatgtttatgtatttatgtcaatcaaggttcatttattgctaatatcaggcattttaattaattgaaaatctatagtaaaatgatttatgagttatgttactttagttttctgtgacgatcaggggaattccatagttgaggtggaattttagcttcatctttagggaaaagaggtaagtggaaataaaatcaagaaacattcgttggtaggaatatctagcaacaacatcagaaatagctgatatgaaagacggttcagcagcagtaacaattataccaataatgagagtagataatatagactcttcagtaaatatgtttaagacaactggctgctaatttgcaagaaaataaaattagagctctactgattgtatgtacaaaaatgtatgtggcttaaacttttagtgaaaaataactataaatatattaaaataaagattagaattctatatcttaagttgagggcttttatcagctaagcaaatgaaatacaaacagaaacaaacatctggagctatgaaggaaattaatgacatattctgttatataaatatttaaaattctacacagtataagggttaacataaatgtaaggtagtgataaatgatggattgatagaaaatatttgcatcatgttaacaggtaaagagttaagattcctaacacacaaacatttacaaaatattaagaaaaatataacagtctgataaaaatgagcaaatatatgaacaagcaatttacaaatgaacaaattgtaactttaataaacatataaaagattacccaacctcagttttaatcatattcaacaattgtttttaacatttcaaattagcagaaaatataaagattggtaatatttagtacttgtgggaatataacctttaacacatcactgatgggattgccaattgacacaatagttttggggaaaatttgtccacctctactaaaattaaattttcaaatatagtgaactacattatataattgctgtcattctgaaaagcagttcttcaatgacaagtgtatggaatggtgtattagtctgtttgcattgctgtacaggaagacctgagactaggtaaatataaagaaaagaggtttatttggcttgtggtactgcaggctatacaagcttggtgccagcatctgcttggtttctggtgaggcctcagaaagcttacaatcatggcagaaggcaaagccagaagccagcctcttttaaacagccgtgtctaaacagccatgaactaacagagtgaggtctcactgctgaagggaaggcacttcatgaaggatccacctccataacccaaacatctcccaccaggctcacctccaacactggggatcacatttcaacatgagatttggaggggacaaacatacaaactatataaaatgcttatatttctatcattttgttacataaatatgggcttatatgttagtgcattttagcttttcagatggtagcactgtctcatacactcatgtatgacttgtgaacatctctgcctcttggaccttgccctacacttgtgttttagttagttacttcacttctctgtgaaatttattttaggatattatagagcatcttgctttttaaaaaaccatctgtaaaggttttggcaaattccatttctgtcttctgattcttactctgatctaatttgcttttgactgtaacattagtgagaatagttcaatggtaagaatattatctataatgcagactttctctagcacattcaaaacgtagtcccactcctcagtttcaactaagagtctttgatttagttatggcctactttctttctttctttctatgtgctcagaccaaaactttcatgttctaatttagatattcttttgaatttattttctagatcactactttatatacatctagtcctcaccattagtcaatacttgctttaaaagaagaaatcttttatggttttcttttggatttctaatgcctagagtctttgcatttgatttcattagtatattatgaggaaaaatcttttagaagaactgattttaatatgcttgattgtatggcttatcatattgtcacagaaatgaaattaattggattaacttgattgatttattcttcactgagccataattgtgtgtttaaatttttgccaattttatttgttctagattttaaagttaaagcaacatttattatatttttctactgtcttcttttgatcccttaagatggacacttacttccttataatcagtgatttctttcattaaccttgtcctctcctccacaaagccactaacaccccaattaaaaaatgctttgggatgaatttagcagggcaccttgaactgaatatgtctagtatttgcaagctacagtttggctaataccttcatatgatatgttcttttctgagcttctcttgctttctgttgactagtcagtcggtattagtctctctcatttgcttgtgacgtcctgtcttgttttatctttctgtctttaattgctcacagttaagtgttggatattttctgattcttggatgatttcatgcttccccttaaaaatagagccattaaatgaatgaaggctcatgattggtttcagaagacaagttgggattttcagacttggtctcaggtggtgaatgttggattatgaactagtgaattaattaactataatttgggttgagaatacattttaatgcttcttatttagaccttaagtaccttttgaaaacaaaaatgaaaaactaaactttttttgttattttcctccttgacatattttgatagtttatgaatttagccataaattttaaaaagcaacaaatataatttacttagcaaactttggcaaatgcaaatgcagctgcagggaaaaagtcaatagactgttaagttgaatgatttctcagtcctatgatattttcaataatgtgttgaaaatgaaaaatgattttatagaaacattcataggcatgacattctcctttgttaccattcaaagtattttaatacaagtagagacttacatatctgagaaaagtcgtcttacggtaatttgaaaatatacctattctaatgcttttcttgttgttctactttttaaaattatacgttttaatataagccattcacttcctattgggatccatgttctttttaagacctggacataatccaaaaagaatgtcttcaattccacagtgttatgctatccattaataatattacttaataaacagggcttttgtgaattatattacagacatttggcaaacagatgaaaatgtaaggactgaaaatatgccaattcttggcaattgtctttcctatgagaaagtgtttttagtagaaacaaaaatgaatgaagttgagaaaaggtgaatggtgaattcaggggcaggttcacatatttagccatcctaaggaattttccgtacaaaatactattcatttgtttataaggtcaatgtcacaaattggtggctcacaggtagaaacagtgtttaaacagttttaatttaattttctgcaagagttttcactttaaaatatttatttattcttcaatcttttttatttatttatttttttgagagggagtctcactctgtcaccgaggctggagtgcagtggcatgatcttggctcactgcaacctcagcctctcagcttcaagcaattcttctgcctcagtctcccaagtagctgggactacagctgcacaccaccacacgcggctaactttttgtatttttttttttgtagagatgggtttcaccttgttggccaggcaggtcttgaactcctgacctcaagtgctccacctgcctcggactcccaaagtgctgggattacaggcatgagccaccactcctggccctcaacttttattttaagttcagaggaacatgtgtaggatgtgcaggtttgttacttaggtaaaggtgtgccatggtggcttgttgcatagatcatcccctcacctaggtattaagtccagaaaccattagctattcctcctgatgctcttccccccacagcccccaccatccctaagaggccccaatgtgtgttgttccccgacatgtgtccatgtgttctcataattcggatcccacttgtaagtgagaatacgtaatgtttgattttttgtaccggcattattttgctgagaataatgacttccaactctattcatgtccctgcaaatgatttatatttctggtaatacacagtaatgggattgctgggtcaaatggtatttctgcctctagatctttgaggaatttccacactgtcttccacaatggttgaactatttatactcccaccaacagtgtaaaggtgttcccttttctccacaaccttggagcttctgcacagcaaaagaaactatggtcagagtgaacagacaacctatagaaggggagaatatttttgcattctatccatctgacaaaggtataatatccagagtctagaaggaacttaaacaaatttacaagaagaaaacaaccccattaaaaactgggcaaagaaccctgagttagcgagttgttgccaggggaggacattaatgtcttcttttgagaactgtctgttcatgttcattgcccaatttttaatggggttgtttgtttgagaacagttctcaaaagaagacatatgtgtggccaacaaacgtatgaaaaaaagctcagcatcactgatcattagagaaatgcatatcaaaaccacaatgagataccagctcatgccagtcagaatggcgattattaaaagttaaaaaatgacacaaatttttaattcctcacttctcttaatcagaacatagtctaacactgtgtccatttcctgccatcaacaactcactgattcagggtgacatttaccacatttacaacagtatcactcttgggcttgctacaacattcactactatgtatatccttatacatgggcgacatcactttggtgaactacctggccttgaaagactcggagcttcttaacctcctaaagcaaaactgatggatagattgagacactagaagctagaatacatttttaattattctgagtagagaaagaccagctgttcattgctatattcattgttaactcctatttcttttacccctttataaaaataaaaactcacaaataaccgaaaacaactcaagaaaatctattagcaaagacactgtttactctgagatgaaattaaagccatgcttactttttttttaattacatttttgacatctaaaaacatttaccttggggagcctcactgattctcctctgcactctttgaccaggaactccgatacatttttgtattgtactggcaattttaaggccttgactttaatgtatgatacataccataaatacttcactcatagagaatacttttagaatacttgtcgcatttctttccaagaatgaaaaaaaagcagtaaatgcttaatttactaggctcactttagaactgatttagggtgaaacaaatccaaaagcctagatgctattcattaactttcatacaaagttaaatatttcaaagtagaaattagaaatacatggtattgaacttgcatgaatcattatatatctcacaagttacaaacatgttatttataaatgtttaatttcatttgaataaaaaatagccactgttacttgcatttttaagtaaacttttaattttgagataattatagatttatatacagttgtaaaaaataatataaagacaatttgtgtactctaccaatttgtcccatggtaacatctggcaaaactagtgtttttttctttttacatcaaaagtgtgatttgtgtacaataaaatatacccacttaaaaatatatagtttgatgagttttggcatatgtgtaccctgtgtaatcaccatccctgtctagagatggaatgtttcactctcccaaacgttctcttatgcttctttgcagtcagtgctgtctctgaacccccaatcccaggaaaccaccaatcttatttctatcaatacagattagttttgcctgttccaaaatttcttagcatagtgttatttggtatgtaatattttcgtacataggcttttaaatcccacctcacccccacttttagatcattccctaattacatgtgctgttagctttactgcaacatggtatctctggcccacttaatcagaaatccattataagtatcaaagtgtatatattaagctcataggtacataatacaagctaggaattggaagcctgggtttatctgtcaactaacatatttgcaaagctataatatatttattacttctttttcttatctagtactttctttacttgatctaagagttcaagtgttgaatagaatctagttttaagaaaagtgttgtcagttgaaacttgaatccttatgagttgtctttttcctttaataactacatttacctttcggggctctggccaagagtgatgcaatgatcagtgtctcagccaagcattggcacttcattggctacttagctattctttcgtcattttgtgacatcattacctgcaagggtagccaagccttcacagagcaatttattagtaaccatgaacacttcttattctttggctctaacttatgacccttttataacattaatcatagatcttatgaattaactacaatcaaactatcagtataaatttttgttagcattataaatagcacagccagcttgaaactttttatataataagccttcctaccactcaataatttgaatggtgccaacatcacactctagaatgcttattatataaatgaatatttctgttatttttgaaagattcctttagagcaccaaagtccaaaagtatgaatcatcatgactaatttgtgtcatatttatattatatatcaggctttaccactgcttattttttctctgtttgttcgcagattttaccctaaatatattttatttatattttaattattgtaatgctagtaaattaattcatttttatataactagcattcacacagttcatattataggatctacatttgatatatgtttagtaagtcaaggtaaagaattttctttcctcactgacatgatgatattattaatctttgaaaaacacttgtactagttctttccgtgagataggtatgtgcataaatgcttttaaaatataagttgaaaacatgaaaaagaggttatgagcatggagataaattaagacagccttacagaagaagcaaatagagatagtgaaagtataaacatagtaaaagaaaagataatatttgaagggataagagtaaagaattatctaaaggtgaggaatgacatgatttttctgaatcccaagtaggctaagaaaagtaaatgcatacataggtataatataatgaatccaataatcaccaaagaccaagcagccagaaagacagaaatctgataatcaccaaagacagaacagcatcctaaaaacagccagagagaaaaatacaaagtgtaagaaattaatttctaagacactactgatatatttctcaacagccacaatgaaagccagaagacagcagagtagtgcctttgaaatgcagagagaaggcaaccaagaaatatggaattgtatttgtagtagtaccatcaattagaaacaagaaagaaagaatgcatttttagtttacagatatatatatcaatattatcaccagcagactctcaataaaagaatttttcgagaatacttttcataaggatatataatgtttccagaaaataggcctggtgtgaaggaaggaattgtgagcaagtaaaccagcaaatatgtggataaatatagaggaaaatttactgcgttaaataaaaataaggttatatgtaagaaagagtataaaaagtagcaggataccattaaatggtcattaaaaatagcatttaaagggaaggggtaaactccaacttcagctccctctagccattctgttgcaccttggggtaagaagagcagttactgagaaatacttgtaaagttcacagccaatgagcacagggctcattaaaaactgaaaactaatcctagaatcatagaacaggggtccccaacccctgggccactggtcagtagtggtctgtggtctattagaaaccggactgcatagtaggacgtgagcagctggtgagctatcattacttcctgagctctgcctcctgtcagatcagcagtgacatgaagttgtcataggagcataaaccccattgtgaactgtacatgtgagggatttaggttgtgcactccttctgagaattcctgatgctttgaggtggaataccttcatcttgaaaccattccccatgtgctgccctcacacccagttcgtggaaaagttgtcttccacaaaaccgatccctggtgccaaaaatattggggaccactgccatagaacgctttccctcccctctcatcttaccaccacaccatgaaaggcctgtttgccagagttccctttactcagtacatcatgtctggatttcaacaaaaagttacaaagcacactaaaacaccaaaaacaaacaaacaaagaaacaaacaaacaacctcacagtttgaagagagagagcaaaaatgagaatgagactcagacatggaaaggatatggaaattatcagaccagaaacttaaagcggctctgatgaatacactaaaggctctaatggaaaaagtagacaacatgcaaaaatagatggcaatataagctgaaagataaaaattctgacaaagaagcaaaaagaaaagctagagatcagaaacactttcatagaaataaagaatgcctttaattggatcattaatatttggggacagctgataaaagaatctgagtttgaagatgtgtcaatagagactaccaaaatagaaaggtaaaaagaaaaatgactgaacaaatagagcagaatatctaagaactgtgagacagctaccaaaaatgtaaatacatataatggggaagaagaagaagaagagaaaggaacagaagaaatatttggaacaataatgactaagaatttttcatattccaaatgcagaaaaatcaaagttagggaaaaatatcttaaaaggagcctggctgaagggggaacatctagcctatgaaaaagcaaagataagaattacattctacttctcctcagaaagcatgcaagcaagaaaagtggttaaatagttaggtgttgacagaaaaaaaaaaatccacctagaattctgtatcttgcaaaattatcctttaaaagtaaaggaaaaatactttctcaaacaaaaaccagtagacttttcttgccttgcaagaatgttaaaggaagaacttcagagagagagaaaaaatgatacaggtcagaaaactcagatttatgtaaagaaagggagaacattagagaaagaataaataaaataacttttatttttcttatccttaattgatctagtagataccagtttgttcaaaattataataagaacaatgtatttcattattatagcatgtgtgtaagtgaaatgaatgatagcaacaatacaagacaccagagggaggaactaggaatactttattattattaggtactcatgccaccttttaagtggtatcgtgttatttaaaagtcaacttggaactctcgcatgacattattttgtcttgatagttcaagctccacctgcggttctcccgtcctccatgccaggtgtcaggggctgctctggatgttaactcttccgccccatgacttccagttccaaaatggcggcacagaaacaagctgccatgccacaaccccaccgcgcccctctcccgccaaaaagaaaaattaacaaatatacattgctgagattatcaccagaaattgtcacgatagtccagaactcaaatatgaagatataactgttcccagggccataaggaaatgagaaacaccaagtggatggtaagaaacctgactttcacatttgtagcactcgttaccccattttgcctgacaccaaatatgcagaagattttcctccaactcacttttttctacactggaaaaattaagattgaggtaaacaaccagcttccccagccattctgggttaccggaaagagacctgtcctatccatgcctcaacccactggaagcgtcatgagtgcctaaagggagacatattcctgaagataggcagagacaaagggggatgtaggtctgtcatccccagcctgggaaagtctgctctgtaacttgaccaatgcagacacaatgtcagagtagctgcttagcagcactatgatgcaggaggattatttcactgttctcctcggcacaaacccttaggcagccttcccatactgtcaggatattccctttgggacctctcttgttaagaagggcacaattggattgtttactgaagccaaggcgaacctgggcttaaagcgccccctatagctccctagaggaagcaatttagcagcaaagacatagatgtatgtccacaagaaaaacagcagtaggaaactatgatgtctccaaacagacaaagcagggaaccagggactggccctaacaagacagtaatatgtaagctccctgaccacgaattttaaaatgcagttttaagaaaactcagtgatctccagtagaacacagaaaaataattcagaaattcattagagaaatttaacagagattgaaattttaaaaaatctatcagaaaccttggaactgagaaataaatttaccgaactgaaaaattcactagtagctctcaccatcagaatggattgagcagaggaaagaatcagtgagcttgaagacagaatatttgaaaatatatggtcgaggagaaaaaaagaacacaaagaaatgaagatttcctacaatatatagaaaattattaatacctcaaaaggccaaatgtaagaattaatggtattcaagagggagttgaagaggaaggattagaaatcttattcaacaaaataataacaaaaaattccaaaatttaaaagtatacttggattagttataaatgtatattataagctttatagggcaacccccaaaaaagttttaaaaaggtatagttgatatatttaatacttacaaaggaaagaaaatggaaccatgtaaaaatgctcaactaaaaccacaaaaggtaaaaagtatatagaaaacaagaatagaaacaaagaacaagggcaatgaataaaaagtagtagatattaatccaactatgccagtaactactttgagtgtcaatggtctaaatataccaattaaaagagagagattgttagaatgaattgaagaataaaaccagctcattttataatgccaacattaccctgtaccaacatcagacaaagaaattacaagaaaagaaaaccacagaccaataactctcataaaaatagatgcaaaaattctcaacaaaatattcaaaataaaactattaagcaatgtgtaaaaataattatatatcagaaccaagagggatttatctcaggtttgcaagactggttcagcattcaaaaatcagctaaagtaattcctcacatcaacaggctaaaggggaaaaattacaagattatatcaataaatgtagaaaaagtatttgacaaaatcaagcatccattcatgatcaaaactctccacaaataaggagtagaggagaacatactcaacttaatagaaaatatgtataaaaacctagagtgaacatcatacttaaggataagaaaccagaatctttcctactaagatcaggaataagacaagaatgtttcctctcagcactccttttcaacaacgtattaggaaggaataaaaacaacaacctcatttcaaaataaggcagtaaaggagaacgaaagaaaaaggatatatagaaaatagaaattccaaataaataaacaatcacaacaaatctaaatgtgctgaacatattagaattatgagactgtctggctgaaagagaaaacaacatccacctattgtctgagcagaggctgaattagggcaagagaatgtcttaatcacaaactttacaaaagcaccaaaaacaccctattaagcaagatctataatatttttatgttatatttcaaaaagtcaaatgatttagaaatgtataattaaaaatcaaaattttaagtaaagacacattagtgttgcttgttttatggtcctgtgttattttgtaatgggagctgttgtttctaatcagtccataattcctacctaccagttttataaggttggcatgtacctgtctcatagaaggttttacaatcgtctagaaacagactaggcatgatgggacattatacacagctatttttttaaaactgtagagtgtttattaactttttccatttggctccaaagattggtaaatattttctagttgtatacagaggttcgtatttttcctttgccctcatgctgcaatgcagctcagcatggtacttgtgctgagggtgtgagagacatactcaaaaaacaagcacacttcaagtttgaaaatttaagaaagctagcatgagctacataaatattaggcaaaacagacattactgtttcattaaagaaaaagaggcttattgtataattataaagtataaaattctaagtttacatgcatctcataatatagtttcaaaagtataaagcagaattttatagaaccagaaagagaaattggcaagttctaccatcagcatagaagaatttaatacatctcttattaaaaatgtctttttataaaaagaaagaaaagctacatactagcagttgtcattagcaagacaacacatatataactgacaaaggtaacatttaaattaagcaaactatttgaaaaacagacaaaagaagtgaacaagtaattcacagaagaagccagaagtggcaactgaaatggtcaatatacatgtaaagacatgtgcaactttactggttatcagtaaactaaaaaaaaagaatgtgataatattttatactcatcaagttgtcaaagatggcaaaatctggaaatttcaggaactggtaagtggggactcatacaccacttatgggaaggtgctgctgcactatggaaaacaatttgcaaatgtctacgtggaacactttacagtagtggatatgaaggaatatagctatcacatcaacatgaccagacttctcaaacaatcatactacagaaagcttgttttagaataatacatacactgtatacacttatataaattttaaaatcatacaaatagaaagaagaaactgataaaaggataggaggcaggactaacttgcagctccccctcggacagacagagcagcatgtgaagacacacatcatgaacttttctccaagaactactgcagcaacataccaggaaagccacgagaatccacagatcctttgaaggaaatagattgctgctgcaggctccaggagacagccgaaaaactgtaagtgcccaaagtgtgaaagggggatcttccacccctgaacacatagccttcctggggaacctgaaggtccaggtcacaggtgatggatttggccttacctggagctgagacaaacttagagagctgaacaaaatataagggtaaaggaagcagggggaagagccctgtggactctctcagcccccaggaaaaccatttctgactttgtctcctagggtccttgggtaggactgccagtggaagtggggaaagaccacaaggagaaggaaacttccagatgaactctgtaacaatttcgactgaatgccaactttcctagcagaatctgggggtgagggtgaactgggagtgcagacacagcacagaagttgcatcaggcagggaggtgtgaaacctgaaacccctgcttgcttttccagtggggagacctggagcaggggcaagtcctcagccctgttcacccattgcctggaaataaactcagtgctgttgtggagagtattgtgggagtgagactggccttttgggttgcatgggagctgggtgaggcctttcactgccagctttcccctactttcctggtgacctgtatgatgtagcagaggcagccataatccccctagaaacataactccatcgccctgagaaccacacccccaacactcagagcagcttcagcaaggcctgcccaaggagagtctaagctcagacacacctaaccctgaccctacctgatggcctttctctacctgccctcgtagccagacaaaggacataatctcttgagagctctatggccctgaccaccgcctgagaaacttatccaggagactctagagcaagcttgtatcctccctatgctactgccgttgatgctctcttgaaagcgccacctcctgtctgaaggccaaccaacacaaaactagtgcaataaacaaaaatacaacaaaggaccctcacagagtctacttcactcccctgctatctccaccagagcaggtgctggtatccagggctaagagacctgaagactgatcatatcacagggctgtttgcagttactccccactaccagtctggaggctgctagctccactgggtggctagatccagaagagaaacaacaatcactgcagttcagctctcaggaaggcacatcctggagcacccacatccagggagcacccacatctagggaacacccacatctggggagcaccctgtgggaagaaagaatctgaacaacagcacttgagccccagatcttccctctgacatagtctaaccaaatgaaaagcaacctgaaaaacagttctagtaatatgacaaaacaaggttctttattatccccaaaagatcacaatagcttaccagcaatggatctaaaccaagaagaaaactctgaattcccagaaaaagaactcagaaggttgattattaagtgactgaaggaggcaccaaaggtgaatatgaactcaaaggaatttcaaaaatgttacaggatatgaacagaaaaatctccagataaataaatagcataaataagaagcaatcataatttctggaaattaaggacacacttagaaaaatgcaaaatacactggaaagtcttagcaatagaatccaacaagtagaaggaagaacaccagagcttgaagacaaggcttttgaattaacccaatcaaacaaagacaaagaaaaaaaaaaattaaatgaacaaggcctccaagaagtttgggattatgttaaacgaccaaatctaagaataattggtgttcccaaggaagaagagaaatctaaacgtttggaaaatctatttgagggaataatcaaggaaaacgtccccaaccttgctagagatctagatatccaaatacaagaagctgaaagaacacctgggaaattcatcacaaaaaggtcattgccaaggcacatagtcatcaagttatctaaagtcaagatgaaggaaggaatcttaagagctgtgaggcaaaagcatcaggtaacctatgaaggaaaacctgtcagattaacagcagatttctcagcagaaaccctgcaagctagaaggaattggtgtcctatccttatcctccttaaacaaaacagttattggccaggaattttgtatccagtgaaattaagcttcctaaatgaaggaaaaatacagtctttttccgacaaacaaatgtttagagaacttatcaccaccaagctagcactacaagaactgctaaaagcagctctaaattttgaaacaaatccttgaaatacaccagaatacaacctccttaaagcataaatctcacaggacctataaaaaaaaaacacaatttaaaaaaaagcattcaggcaacaaatagcatgatgaatagaaaggcatctcacatcctaacactaacattgaatgtaaatggcctaaatgcaccacttaaaagatacagaatggcagaaaggataagaactcaccaagcaagtatctgctgtcctcaagagactcatctaacacataaggactcacataaacttaaggtaaagaggtggaaaaagatattccacgaaaatggacaccaaaagcaaacagcagtagctattcttatatcagacaaaacaaacttcaaagcaacagcagttaacaaagagggacattatataatgataaaaggactagtccaacagggaaacatcacaattctaaatatatatgcacctaactccagagctcccagatttagaaaacaattactactaaacctaagaaatgagataaacagcaacacaataatggtgggggacttcagtactccactgacagcactagacagatcatcaagacagaaagtcaacaaagaaacagtggacttaaactatgacttagaacaaatgtacttaacagatatttacagaacattctacccaacaactgcagaatatacattattcatcagcaggtgaaacatcctccaagatacaccatgtgataggccacaaaacaagtctcaatacatttaagaaaactgaaattatatcaagtactctctcagaccaccgtgaaataaaattggaaatcgactcaaaaaggaaccctcaaaaccatgcaaatacatagaaattaaataacctgcttctcaatgattcttgggtcaacaatgaaatcaagatggaaattaaaaaagtcctttaactgaattgtttgatatagtgacacaacctatcaaaacctccatgatacagcaaaggtggtgctaacaggaaagttcatagcattaaatgcctatatcaaaaagtctgaaagagcacaaatagacaatctaaggtcacacctcaaggaactagagaaacaaaaaccaaacccactcttattgacttaataaggaaattaaaaaaagtatgctgagattgctaagatctattataataatgaatcttctatctgtgaaatagtgaaaaaaaaagaaattagtgctagatttgctgtcaaaccacaaagtgcaaaagttacggccgcagtgctagataagtgcctagttcagattgaaaaagcattaaatttgtgactggaagacatgaacagaaaatatgtactatatggaaccaaaatatgtactacatagtacacatagtaccaaacccagttgctgtcacttggcacatagagatctggcatctactggaggtcttcaaatgtattccttgtggaaaacaggactacttactatactactaaattcagatattattagcggagtggaatatatatggcagtatcttgtttctaagttgagtggtacataaaatggtacaattctttttttaattattcataaatttatttttaatatttcagtataatttcccttaaacacaataatatgattgattaatctatcaggaatgtatcacctatgtaaatactcatgctactactaaagacagagtggaggtgactctattcacaatggaataaccattactaaattcatgattactgtgtacatttatagttttactgtaaagattgatcatttgctagctttagtcactcaacaaatatttataaatgccttctatgtgtagtgcattatgctagagtacagccattatgtcttgattacagatgcaagtatttgaaaatattgaaggaccttcatttgtgaaattcaaaaaagattccctggcagacaccaattactataataaatagagatgacttcagtgcaaacaaatgattcaggctaacaattagtaattaacaaataatataaatagtatagacattttaaatcttaaagaaaaatttaaatgcagcaatacttaagaaagggttttttaatttactaatgtagtaatcaagtctaatactacaaaaaatttctaatatgaaataccctttatatttaaataatcaaataccttgtataccagttgactaagtttagaggaatcttaaatattaaaaaacatcaataacgccttatacttcttagtatgtgaattcgtatttgtatgatgtatattattttggagagttgcctgtaagcaccatattaatataatgaatgaagcttttcttcattgaagtcctttgtaaaataatgcaggttatcctgaataaatatggtctctattccaggccatatttcctggaatatcaatagggttaaattattatggttgcaataaaatagaattgctttatcttgtccactatctacaatcttgaataaactttaaaatcctccttctgttctcttaagggaacgtggtgtgtccccatgtgtcttttttatttagtgccctgaacaatccataaataagaggaagaaggaataaagaaggacagagatttcaaaggagaaatcaaatacctaacaacatgcagtattgaaaattaacaaataagaatgcaaggcctctcatgcaaatggttccatctcattcaaccactagacataattacttctgtattcacaaggcctacagtaaggaaatactgtttaaaaaaataggctatcaattatatttatatatagacaacatgtagactgaaggattatccgaataatcctgcctagagtttctgtttttctaaatataggttttatgtcacgtattacaatttgtttcattggataattttccaatcttccatttcactttacccatagaattagactaggcattacttgaattagaatgtttctaaaaatagccacttatattaatagttgaaatattgaagtaactatgtatgatgtgtttgtcgtcattgtattgtcacctatgtttgatcagtattgtccaacagtattagtagttatttattttatgctattaatttcagtatctagagagtgagtaagtacattgtatctgtgaacactttaattatgtaagaatttctagccaagggaaagataattactgaaaaagggatatgtcattgaaggataaacacgtggcatttctgtcttctcagtggtaaagaatagtatttgttttggcttttccaattgaaattacataatctgtaggtaaaaattcacaggtgaagtattattgcatttgcctttaaacctttaatgttactattcaattaaatgctagtcacattaaagtacagtcctgtaatgtgtcataaatgcaatgagtctgttaggacattcactcacacattcaccaaatatatatgatcacctcccatgtgcaaagcacagagccattttctgtctagattctctatgtagttgggcactttatctgtgttcccctctgaaatctatcactgataataaattaacaagtttgtctaacattacctttgccatgggaacattagagctacctagggacacttccattggaaaaaagatacctgagtacactaaagtttttatgtttataaagatgatttctctacctagtagacaaatcacagtgaaactggatcctttgaattaccatggaattgctccagccagaggaaaggggaagccttgaatagagccggaggacaattactattattagagatttaggctcttaacatttccaacatagggggctggtttctactgatgagaaagggaaaatgtacagattttcagagggtctgcaattcattcaggccatctgggaatagttaaaaaaattacctcttttattcagtgagcagtactgtaacagtactaaaaagtgatcattttataatctttcactttgaagcagattgtctttctctccttctcacataggcagtgctgcatccatatctctaaattttatagccaggagtggaataactacatcttttggtttctagggctttgctgtccagtttagactcagcagaaagtaaagatggactgagccagagtgactccagtcaacacctctctccctcgaatactattttcggtccctgaagccagtataaacatggagattagaagtgaggtctttgaaggaaaacatccagatatataaattgagtacctactatgttctagggctccttctaggcacttcttcaacatattgaagacaagttgttttcgatgactcattgtgatcattatgaacttaagcttccaaaggtcattgacactgggagctctcaggaccttgaagggaaattttctccctagcccccagccttttgcaaggacttcatatatctttgtctaagaggatatttttcttccttcttttttcaaagatacatagtaggcatttaagattgttgtataagtgactgaataaataaattgctcttgcagttaaattacttaaacttgtattttacacaagtttctactttctctgtaaatttgaaggtgttaagaaataagtaaaattgagtgtgtggcttgtcatggtggctcccgcctgtaatcccagaactttggtaggccgaggtgggcggatcacttgaagtcaggagtttgagacgagcctgggcaacaaggtgaaaccctgtctctaccaaaaaatacaaaaattagctgggcatggtgatgtgtgcctgtagtaccagatactcgggaggctgaggcatgagaatctcttgaacgtgggtggtggaggtttcagtgagcccagatagtgcctgggctccaacctgggcaacagagcaagactctgtcctttatctccaaaaaaaaaaaaaaaaaaacattgagtctatcaggagtggagttgataaaaatgctttggagactatgggttatctttgaaagattgtctttgctgctctgtaatggtaacgaagaaacactatacttcagtttaatgatccataagaaataactgtcattgtgtattattagaatataatgtaataaaataaatttcatcagtgtcttctagattcaatgactattcaatgattttcatacctgaacatgtcaaagtatttggctgcaacttagcggagttgattagtagcctttaagaagctatcaaaatgaaagcagttaaatgaatcagtggtaaaggtccttgaccctgatatagccattgtctaatctcataatttgggcattcagggacatatcgggggaatccagttgttacagaagaaaccgaaacataattgaaagtgacaaatgatcaactggagattgggaaaacatgaaatagaaaaccatttgcttcaggagctgcctaaaatataagatacacacagagttcttgattttaaatcaaactttaaaatcactggtagaaaaggcagttgaaaattatgagaattcaaaaatttacttataatgcacttaccaattattatttcttccattttgtcatggttatccttgtattatctgaaacgagttgttaagaaccaattatgggaccaagaatttaatacttcatgaaactttataatcaaagaatagactacaaagtattccttctgtctttgcaaaccatacaaaatgataatagaacagtatcatctttaggatcaaagacccaaataggcattggtgtgtcatttagttgcatatgtcttaaatcaaattttaaaacaaatttaggcatcatctctcaaaatctttgcttctgtatattaatcccattgttttggaaaaaatgtatattttttacaaatcatactctgtttactggtggctcaaaaactttttagcttacatagtagttgaaaagagaatcattttttctgcagatttttgctcatctgtgtgtaatttaaaactgaaacatattaattttcttaggttttcttagtgaaatgttacatgcaaatgatgtataattatcttgtaactatccatgcagttacattttatttgctctcaatttttaatacattagtaataaatgtacactgtggaaaaaataaagttataaactttatctgtaaacctaccacccaccggtaaccccagccaataatcttagtttatatactttcaggcattatattattgttattattagtaaacctgtctcatctgtctctatcttcttaaaattgcatatttatatctatagataagtccacctttatctagaatagaggattatactctgtatattatttttaacttgattttcaattcaagctgtattatgaatatatttctctatttatatttataaatgttagcctttttttttttaggaattggaacatcttaaaccactctcttgcttttgggcatttaatttgtttccttctcttcagtattatcaacaccccattattaaaacagaaaatctttatcaagcagctttaaaaacatattctcggacaggcacggtggctcacgcctgtaaacctagcactttgggaggccgaggcgggtggatcacgaggtcaggagatggagaccatcctggctaacatggtgaaaccccgtctctactaaaaatacaaaacaaattagccgggcgtggtggcaggtgcctgtagttccagctactcgggaggttgaggcaggagaatggtgtgaacctgggaggtggagcttgcagtgagccaagattgcgccactgcactccagcctgggcgacagagtgagactccgtctcaaaaaaaaaaaaaaagtattctcctaaattctcagtggaatttctgggtcctgtggaatgtatacatatgttgctcctcctaaaaggagtggataaactcctctcctacaagcagtgttctgcactggccctttctacaaattcctttcaccctggtattatcataatctaaaaaataataatttgagaatcaaaaaataacagctatgcttgttttcttcaggaaaacagaacaggttatccatatatctgcagggtttttttctccacaaaagaaaggccagccattttcaataacaagtagtttggcaggaccagaaccattccattgggtcactggtaaaatttgtctttggctttaaacattaaggcagccaggactgtgtctttggacattgatacagcatttagtccagtcttatttacaattaggctttttgataatggcttttgggctgacgttaagtataaaatctgaaattagattttttaaagattataatcaaaaagcaaaaatgtcttcctagaaatagcaaaggaatgcttttgctggatttgctccactaactcatgtaggcaatataccaaactcaaacagccagcagttgttttgtaaaagacaaactgcatctgaaatcagtatgacaggaccacagtttccatctcatcacttccaccaacttacatttaagaaagcacaacttgaataataaaaaccaccatagagtaaacaaattcttcaatgagaatgctttgaagtcaagagaaaaataggctcagggcattgtgttacagcaaaattttgcctttggcaaaagttttacgatggaatagggtttttaaaatattgggaatcaggtaaattgcatggctaattgaactggggaagacagcttaatgagctcatttctctccttcaaatccaagaagtcagaaggcaagttttcatctattctttcatttatccaattagaacatatcgtccccacacatagggctactagaagaagtaatagttatgtctgatggctcttaggaagtattgtcaatagataggacctcctctgtagttataactacagatgatcaaattaaccagaaataaattttggtcataaatttcttcttgctccactctgtaggctacctcctccaaagcagatcgtagaccagtgcatttataaatcacagaatcaccttttaatggttatagactatatatagcatagtgacagtcatatactgctggtgctggtcaaacttgagatcaacaattctgttggatttttacccctctcttccttctttttcctcctcttccatattctgactttcaggtttgagcatgtaataacttccaggatttgttttgggcattatttatatattaccacttatcctaagattattttgagtcagataaaagtaagacattctattaagttatcttcattttgaagatgaagaaactaagattcatagaagtaaagaggactctaggagtaactaactgtccattgtcattgttaatgttacttaacctctttaatcctctgtcgtgaatccaataacgatcaaagtagtaggcaagtttgctgagggccaactgtgtgacaagcactttgataactgattggtctttacagcaaccttatgagagaagtattattactctcatattatgagtgagaaaaataaggattaaagaggtacaggcaattactcaagaacacagggctagcaaatcaagaaacagaagttagatgtgagatattgtatcacccaggcctaaaagatgcaatgaaacaacccattttaaatgtttaatatagtaaccagagtatactctcatttgatgagagtatactcatcaaatgagagtatgcatttgatgttacttttcacagtggcctttttgcagttaggaaacagcagcaccaataatagaactaagctgtctgactcccagcctgtacctaaatctctaacttttgattttatgaaataaatttgatttgcagatgggcattgctggtgagggaaatgtaaagaggtcaatttccccactttaaatttttttggctaaagacccatagctgacaatattttaatggttgccacatattcttcttttatgaagtgagtttcattttatatttgtaagtggtttttattgcaaatcatcacctaacagtcaattctgaagactttccataaatgtcaccttgtttgtgaattgttctcattctgtctcctctctaaattccctcaagaacaactttctttggacattaatatcattattaattgtgaattgtcagctaacagcttagcaattgtctatcatgctcctaatgcatggatgatacagagaatataaagtcaataacttgtatttcctgaaagatacatatacagaagccaatcatttcagtagagtgacaggagcaagattgaggtattaatagagtactctgagagatgagaagcgggacaactaccttagcctaaaggtttgcaaatgattgtggggaaaaataatctttatcactccaaaaagaatattacagtgatattttaattgaccatagagtttaacttgaccattgtaaaatgaccaaaagggtgaattattttttaccaattattaaaaagtagcactacctgatataaacagtgtgacctaatgtttacattcttattattttttctcctttttgtctttttctctctccccagctaagtagaaaaaactcactttgttttcatgctaaaattttggaataccattaaacagcaacacactggacaactacattcttatgttttatcttctccctttaagattgttaaaggaagaaattgaactagtggggaaaagtaaatactggccaaaaaaaaatgcttttgactagtgtatgttccaatgatgattatgaaatatgtcaaactgttctaaaatactaaatatgtgttactatttattctgtattaaaatagaacaatagaataacctttgttgtcccaatatgaaaatagtttttaacaatgttaatataaaacaaagagcaaaggaccattatcttggataaacagagagacattactttacatggtttgactcccctgattcataatttaacatgtaactctggcatatgctgggcacttagggaagtcacattaagtatttcacagcaaatggagagtgagaaaaatgattttcagaaatcctggtatttacttattataaatcttgtcttgaatttattgtactttacatgaaatataatttgataaaatgtaattggtttcagtgtgtatgcaaaatgagaattttctgatcattcagatatcaaaattaactttataaatacaaatacatataattacctattaaaattctaaggtgtatttattttaataaaagtctttatcaaacctagataaatctcatttatgattataaatgtaaaactcctaaatttttttttacttggctttatttactattaatgatgttgggtttattaaaaaatgcaagcacagactccaattagcctactaacctattgtataatttatcaattcaataggtcaaacaattaaatcagaacatttaataaaattgacaatatttttttatttttttacaaaaatccatattggttgttttgaagtagcaatttcttcttcaaaatgataaaaattgtctatgtaaaatcaatagtcaatactataaaagctgcaacattatagacattttcattaaaatgagtaaaaagataattatgcctatcacactactataccatataaattaactattatgctgaaaattctggccaataaagtaggggaaggaaataaatataactgtatatttaaaattatgaactaaatcttcactgttttacaggcaaaggaaaattctaatatctgataaaatctttaaagtcaattaaaaaagagtatactaaagaaaaatgaataattttctcaaaaaggactatatctaaccaagaactaggtgaagattggcattactagtatccaaagacataaatactaaaacagtaattgacatattatctaaaatcaaaatagtgaagatataacaattatgggcagaacacaagaaaatggacattctcagatattgctggtgtgagtatgagtttaatttttctagaaggaatttgaccatatttaacaaaatctttaaaatgtttatactctttgataatgtaatttcatctcataattttcttaaggtaatacttagatatatatccactcccgatccccaaaataaaatggaaaaaaaaaaactaaatgtgtaatgattgcagaagggttgaatgttattttatgagaaatataagaaataatgcagcaaaatacatgatgtttaattatacaaaactatgtagtaatacaaaatatatgatttttaataacacaatacccatgtatattcataattttgaaaagaagaaatatatgcatatacaaatttgaaagaaattatctcatgttgacattttgacttatcatttgctagtcaaattaccagtgcttttaattttctacctcctgcctttgttttataaagaatatttttattatgtctatagttatactaaactcagttcagttgaattgttatttaaatctatggaaaaaattttgctttgtccataaattgtatttatattagaaagttaaaataattaattataaaacatatatccaggtttttttatttgttccagtacataacagacctattacataatttgagtaaattttgtcttacagttatacaggcagttctctccttacacaattctgatatgcatgaatatcagttatcatagtttagttaaatgctaacagtcctccaacaacgtaactcaagtgttgggtaacattgaatattactgtgagtaattacataaacaaacattgctgctggctctgcagtccacaaattaccacataaaataacagatgcacattgtgatcagtgaccgatcacgtttatttttttcagtatctgttggtgattgcgcactacacatttatcattcagtttatttatagaagagaagcgtgtggttgtgttgcctccttgtgagtgataaacccgagtgacactttacaaacacagatattcaaaaaagaagaggaattggacagcaaagaggaaagcactgcaaagaaagaaaatacttgaagtaaaattcagattgaacctaagtggagtcatagaagaaatagtcactactgaggtttgagagattctgaatacgtagccagagctacttagtgaaggtgaacttaacataagtgagggaagtgcttgccacaaatagggtgaagatgtcctggaggaagtgacacccaaacacttcacattagaggaattctcacaggtacttcacaacactaaaagcataaaagttaaaatgttggaagctgattcaaacttagaaaggagcgtgacaattcaccaaggcatagaaaagaagtggccgggtgcggtggctcacgcctgtaatcccagcactttgggcggccgaggtgggcagaacacgaggtcaggagatcgagaccatgctggctaacagggtgaaaccccgtctctactaaaaatacaaaaaattagccaagcgtggtggcgggcgcctgtagtctcagctacttgggaggctgaggcgggagaatcgcttgaacccgtgaggcggagcttgcagtgggcagagatcatgccactgcactccagcctggggaacagagtgagactccatctcaaaaaaaaaaaaaaaaaaaaagatgcttgtgttcagtgtgataagttataggtgagatgaaggcaagcactgttcaaagtacttttagtgagtattttacaaaggactaaaacaacttctccaagtttttaatgttttaaattacagagtactaaataaatggtcatttttactggtttatttctttacatttataaccagcattggagagttgttaacatgttgaagttttacaaagtcttagagctatcataacctttcctgttgattattaagatcactttgcatgtttgtaacacaaaggttaaacacttgaggggatagatgtcgcattttccaagatgtgatgattacacgttgtatctctttttcaaaacatcccatgtagcctataaatacatacacctactacgtacccacaaaaattaaaaattaagaaaaaaaaagatcattttccatggttcaagtttgcatggtcacttttacaattccaccctaccatgcccgtaaatatgctatttctgacttacgaaatatttttcaaataaaatcattgctgacttttaactcactgatatgtgctttacttctggtgaaaggcctaacatatcaataaaatgaaagaaaatcacagctttattttctttactgttctgatattttttgttctagtgtgatcgctgcttgcctctttataatgacaagcctttccgccaaggtgatcaagtttacgctttcaattgtaaaccttgtcaatgcaacagccattccaaaagctgccattacaacatctctgtagacccatttccttttgagcacttcagagggggaggaggagtttgtgatgattgtgagcataacactacaggtaagtagcaaataaattcctgagttggtttggaggcctgtgtgcttctatctacaatgcatattattttaaattatgttattgctatcttatttaaggatgtactttcatacctttaagtttgaaaatcaaagctagttcaccaaatcttcctatttccaaatcactaggtagttttcagaaatagcactctagtcttaaactatatcttttcaggaaaaggattttgttgttgttgttttgttttgttttgttttttaaagagttcacaccatttgactaaaccacaaccatatttagaataactcgggaatgcttactttgaacacatatccttaaagtaagtttccttttgtcccctttattgtcctttatgtctggattctcatgtggagatggcattcattcagatttggcatggacactggtagtctgagaatactctttttgaaaatactaattaaatggagacgatgataatcaaagtcctgttctaaaactacaaagcctttgactagtcattgaaaaataccatccttattttgaaaggcaagaaatggccaacatctgaatttgtgaaatataatagcatatatctgatgggtttcaaagtggtactcttaagcatgaatccatttatcggctgattattgataacttaaatatcacaagatcttgggtaggtgctggggacatgaagatgaataagacaatgaattttctgtctttgggttattgtacagtgggaaagacagactattgaaaggaatgattacaaagttgtctgatgattgctaagatagggcaaggacagtaggagttaaccagttgaaagattaggatggtgaactaaggcttacaattagggaaacattttgtgcagtggcctagaggagggagaaaaatgacacgtttgaaaaaccataagatgggcaaatggctggtggtaagagatattaggaaggaaggcaggacaatatcatagaggactctggagccatgataaagcctttggcttttatctaaggtcaaggagatgacacttaagggttttatatgggaaaggggcataatgagttacttgttattaaaagatacacctggttataaagtaaaaaatggattggagaaggttagagtggttggggaaaactagttagtgaggtgctgcaatagtccaggtgagaaataatgtcagaatacatttcagatggtacggatagagagaaatggatccaagagatatttaggataaaaaagtgagtgttttgtgagcagagtgtaggcaagggaaggaaggagagccaagactgatacctaacattacattctagcttgagcagtaggctcaacattggtgccagccattgagatagaaaatacaggaggattgagatgagggaggagatggcaagttctgttgtggatatgttcactcggtttctaagagacataggagaaactcctgggggcagttggaaacacagttctgaagctctttccttcaaggaaatcctctcatgatgctttagagaagatcagaatcacttacacatgttagtgacaactatgcttatcatggtttataaatgtgtattactcctggtattatttagttcagattcctcttacctcctagactgtaagagagctttgtgaaagagatgcaatgggtattgtgtatttagtttactactgtattacacagcacttagcacagtatttggtacatagtaatcacgcgataaatattcattaattcataaataaaagagagatttctggattggagatatggatttgggagtcaacagcatatgtaaatggaaatagtctagaaatattataaatcaatttaatttttaactagctcaatagccaatatctatcagaatatgagttttcatattattgattattgattatttctgtagtcttcaaatattggagaaatttcaatattttttgagcaaagtacatcatgtttaaagggggaattgatagtcttgagttctacttcagcttatttcaattatcttatacactagtcacgttcactttaaaaattccttgtagtttaggttttttattacataatatagcaaaggaaatttgtaattataaattataaactatgggaattacctgatatatctaatatgtcaggctattctagtatttagtatgaaaagtacttggtatctctaaatataatgaatttctatttcaatctttgaaatgaaaaataatggccactaacataatcatttgtttttaattgtgttaactacagaataataaattatattaagagaagtctcccattttacatgattgagttctagaaaaatatttccaatactacatacctgcttgcttcttactgtataagtatcatctaccacatatgtagaaatttctcctgctgtattgagtttagataaagtgcctggccccagatataaagttttaagtttaggagcaaactctttccaaatgtatgggcccctataaagcacagctttttagaagtgtggtattatataacagatgggagtttaatgaagtaaagcacagtttgtaacaggttcattgtttcatatgctctggatcactaaattggcaggtagagatgaaaggtgcattaaaacggacgttccgaaaattatagaattccctcaaaggaatacagtctttaattttgaattatgcagctgattttaatgaattagaagtcataatgcataacctttccctgatgcaggaaggaactgtgagctgtgcaaggattactttttccgacaagttggtgcagatccttcggccatagatgtttgcaaaccctgtgactgtgatacagttggcactagaaatggtagcattctttgtgatcaggtgagtttttctgagtatttaaggtaaaggattactctgtctgccagaaacttatttggatgttattccactagtagaattgaagactgcatttgccaggaaatcctctatgtgcatttgcatttcaaagagatggttgttcgtgtgcaactttgagtatggacatgaaatatagcactagttcggtggtcctttgcatataaaaaggcttattttagttttaattttacaaatgtcaaaaaatcgaagggtaggggttctaagtaaattggggtatatgtcttggaattattggtgaattaatattaatacatgatataaataaacaagaatagtttctccaaaaattccatagaagatcatatagcaaaagtcacttacacttagggccaaatggaaattatgatagcctcgcttctcaatttcttagtctaactttccctcttaaaagtacaatggattttttataattttaaaactttctgtttacttacatcacaaatatcgatgtctagcctacatgcacacagattctaactaacctcagttcatgtatcctacctcaagcaggaaaacaggcttcttattgaagctgaagtttttcctgttctgataatactaataagtgaaaattgtgaaaatcggtaaaggagaaatttactttgaagaatcaattcaatgattgtattaattttaaacagttatatactctgttatgaataaataaggctaggagcataaaccacaatccagttatagaatatttgttaaaaagttatattgtgaacataatacacacaagacaaaatatctttctcctataattttgagaattcattaaaaattgctttcccaaataaaagacaaatataaaccaagacaaaatatggattcaaagaccttcagagtaaccatcatgtgtcaataagggggcattacatgcttcattagaaagctgaagagtagaaaaattattaataaagacaatttctactatttttattttataatattgagggactattttctcagaaagtcatactacagttttccatatattaattagtaaactctgactgtatctttagattatatttcatttttacacatccaccctgagttttcagcatggctatcttttgcttatcattcaaatattgatatatcatattttgagatatctttgctgaccacccaattacaaaacattctcaagtctttcatatcaccatgttactctcattacaggctctgtaaaattaatttatttgtttacttttcttcttctctctttccaacataaacagaacagtttcgatcatataaaaagcccccaataagtatttgtcacataaatgttgaatgaataaagagagattatctgagcactgatcttatagttagattgttattttaaacggtcattacaataatctgagcattatgtaaattttcacttgcagaacagtttttctccctgaaaatctaaggtcaagagctttgttatatagtataggaagactgtaaactatagttttacctcccagaatctcagttacgtgtctaacctacacgagttacagtgcatcagatttgtctctccatttcaccattcagatctacaagaaattgaaacctgatttttctgaactcaaacttctatttcaagtccgttttatagggatgctagacaaccttgggtggttctgtgcttgtaaataattaacaactgactaagaaaaaaaaaaggccaccataatcaatttcaatctaccagtgagatgtcactgaacatggatttcagaagaaatgtacttaatctgctcttatgagccagtgcagtgtactccagcatactactggctctagatttctttcttaacatcttataaagtggagctaattattggatggaattatgaaagactgtaccatttataagcaggatattagctgtagatagtgttattttttaagttggagaaatttttctctattcctagtttttctgagagtggtttttatgaatggtgttgaattttgtcagctgctatttctgcatcaattattatgatcatgtgatctttttttctttagtttgttagtgaagtagaatacattggttgcctttcaaatgttgaaccagcattgcatccctggaataaaaccacctttgtgtgtgtctttgtgtgtaattcttttcatatattgttaaattttatttgctaaaattttgctaaggattttacatctgtattcataagaaatattgctctatggttttgtttttataaattgtgtttgtttcattttgttattaggataatactctcgtaaaatgaattataaaatcttccttcctgttgtttttctataagaaatgcagaactggtgttaattactctttaaagtttaccccattctaatacatagtattctagtaaatacagtaccccatgtattagtccatttttgtactgctgggaagaaatacccaagacagagtaagttgtaaagaaaaataggtttttatttatttatttatttatttatttagagacagagtctcgctctgtcacccaggctggagtgcagtggctcaatcttggctcactgccacctccacctctggggttcaagctattctcctgcctcggcctcctgaacagctaggattgcagatgctcaccaccatgcctggctaatttttttcttttttttgtatttttagtagagacagagtttcaccatgttggctagactggtgtcaaatcccacccacctcagcctcccaaagtgctaggattacaggcatgagccaccacacctggccagaagaatagatttaatggacttacaattctacgtggctgggaaggcctcacaatcatggctgaaagcaaaggagaagcaaaggcatgtcttacatggcagcaggcaagagagaagtgccgagtgaggaacagggaaagccccttttgaaaccatcagatttcatgagaactaattcactatcattagaacagaatgggggaaactgcccccatgattcaattatctccacctggttcctcccacaacacatggggattatgggaactacaattcaagatgagatttgggttgggacacagccaaactcacacttggcccctcccaaatctcatgttctcaccattcaaaacaaaatcatgcccttccaagagtcccccacagtgttaactcattccagcattaactcaaaagttcaagtccaaagtctcatctgaggcaaggcatgtcccttctgcctacaagcctgtaaaagcaaaagcaagttagttacttcctagatacaatagcggtacaggcaatgggtaactacacacattccaaataggagaaattggccaaagcaaagggcctacagtccccatgcaagtctgaaacccaatggggcagtcattaaacctcaaagttaccaaatgatctcctttgactccatatcttacatccagggcatgctgatgcaagaggtagctcccacagccttgggcagctcggcccctgtggctttgctgggtacagccctccttctggctcctttcacaggctggcattgagtgtctgtggcttttccaggcacacgatgcaaggtgttggtggatctaccattctgaggtctggaggatggtggcccccttctcacagattcaccaggcagtaccccagtggggactctgtgtggggggtctgaccccacatttcccttccacactaccttagcagaggtacttcattcattagggctctgcccctgcagcacatcctctgcctggacatccaggcatttccatacatcctctgaaagctaggcggaagttcccaaacctcaattcttgtcttctgcacacctgcaggcccaacaccatgtggaagctgccaaggcttggagctgccattctctgatgcaatagtctgagctgtatgttgatcccttttagccatagctggagcagttgggacacggcaccaagtccctagactgcacacagtgggggggccctgggcccatgggaccattttttcctcctaggcctccaggcctgtgatgggaggggtgatgagacatgtcctggagacactttcccccattgtcttggtgattaacatttggcttcttgttagttatgcaaatttctgcagccaacttgaatttctctccggaaaatgtgttttgcttttctactgcattgtcagcctgcaaatttttcaaacttttatgctctgcttcctctttaacacttactacttagacatttcttccactagataccctaaatcatctctttcaagttcaaagctctgcagatctccaggggaggggcaaaatgccaccagcctctttgcatagcaagaatgacctttactccagttccccacaagttacttatctccagctgagaccacctcagcctggcctttattgtccatatcactatcagcattttggtcaaagccattcaacaagtctccaggaagttccaaactttcccacatctttctgtcttctgagccctccaatctctttcaaactttcccacattttcctaccttcttctgagccctcccaactgttccagcctctgcctgttacccagtcccaaagttgcttccacttttttgggtgtctttacagcagcgccccactacccagtactgatttattgtattagtccattctcactcaactataagaacaaacctgagactgggtaatttataaaggaaggatgttaattgacttatagttcctcagggcgggggaggcctcagtaaacttacaatcatggcagaaggggaaacaaacacatccttcttcacatggtgacagcaaggagaagtgccaagtgagggtgggggaaagttccttataaaaccatcagatcatgtgagaactcactatcagaagaataggatgggagaaactgcccctcatgattcaattatctccacctggttcctcccatgacatggggattatgggaactacaattcaagatgagatttgggtggggacacagcgaacacatattgctccagtaaaactatctcagatttctttggaaacagaaataatttattattaattcaaaattaaatactacatatatatgtacatatatgtgtgtatatatgtatatatatagagagagaaagacagagagagagatacaaggaaatgagagtcatattaacatcattaggaatttaatattactagaagacagttcagaataaccttaaaatcccaaaagaagacattttgaagaaaaacttgatactcagttctatccaagctatggcaccaacatgaggttaagattctttttgtacgagagatggtcaaaacattaccattcataaccccatattaaaatattcaatatgcaaagtgaaaaaggaatgtaagactggggacaacattaaacaaaggaaatgacaaacaattatgatccaaagaaataaatacataagtcaaaaaatattttcaaagtatccattggtctttatggtctgcaaggatagtttccttacatacatgtttagtaattcaattttatttaagatcaaatcacaattttttgtgatttgagataaacaaataacaagtagagggctaaaaatactatatccaaatatttcagtgagaaactggatgcttttttcctaagatcaaaagcaagataacaatatcccataacattgtactgaaagttgtagccaagaaaatgaaataaaagacattgagactggaaaaagagaagttatttgtatttgcatatgccattatcttatagatagaaaatcctaaggaattaattcaaaagtattaaaactaataaattcaggctgggcgcggtggctcatgcctgtaatcccagcactttgggaagccgaggcgggtggatcacgaggtcagcagatggagaccatcctggctaacatggtgaaaccccatctctattacaaatacaaaaacaaaattagctgggcatggtggtgggtgcctgtagtcccagctactggggaggctgaggtgggagaatggtgtgaacctgggaggtggagcttgcagtgagctgagatcatgccactgcactccagcctgggcgacagaacgagactacatctaacaacaacaacagaaaaaaacctaataaattcagcaaggttgcagagtacaatatcaatacacaaagatcaattatatttccatatatttgcactgaacaatctgaaaataaaattaagaaaacgtcttttaaaaatcaccaaaagattaaaatatttagaaaaacatttagtaaaagaagtgtaaaattatattctgaaaaccataaaacattgctgaaataaagaagaactaaataaatagaatgacacccaatgctcatgtatcagaagacttaatattattaaattaacaacactctccaattgatctacagatttagtgtaatctttgttaaatgcccaccttacttctttgcagacattgaccatatgatcctaaagtttgtatgaaattcatgggactcaaaaatgtccaagataaccttataaaaaaagagttggaaaactcacccttcccaatttcaaaatttactataatcaagacagcatggtactgggataaagatagacatagagacatattcactgaaatagaattgagaatttacaaataagccctcatatttatagtcaattgatttttgacaacagtgccaagacagttcagtggagaaagtgtagtcgttttaacaaatggtcctgggacaattgtgtttttatatgcaaaagaatgaacttggactcctaccccacctcacatataaacaaattaattcaaattaaacaaaatattgaatataaaagctaaaattataaaatcttgagaagaaaatgtagatgcaaatcttcatgtcctcggattagccagtggctttttagatatgacaccaaacgcctaagaaacagaagataaaatgtgtaagttggacttcattagaattaatatttcaaagcacaccaacaagaaagtgaaataaacaacccaaagaattagttgcaaagtatataataaatctgtaataatgaagaaaatatttgcacagcatatatctgataagaagcttgtctagtatatatgaagaacttgaagtgaataatcaaaagacaaataactcaattttaaaatgcgcaaataatctgaatagatatttctctaaggaagatataaaattaccagcaagcacataaaaagatttttgacattagtcatcagggaaatgcaaatcaaaactactgtgcaagcccacttcccaaccagtgggatgactgcaactcaaaaaaaaaaaaaaaaaaaaaacagacaaaaacaaaatttggtgaggatgtggagaaattggagtcttctcataggctgcctgtgagaatgtaaaatgtgcaccgactttggaaaatggcttagtgtttctcaaaatattaaagatggaattaccatataacccagaagtttcactcctctgtatgtatcatatatcctcataaaatcttattggtgaatgtcaatgccacattgtttgtaatagtcagaatgtccatcaactgctgaatgaatagataaaatgtagtataatcacacaatggaatattattttacattaaaaagaaagaaattactggtacctgctacaaaatgtgctcaagtctcagaaattagagtagggaaaggaagacggacgaagaatagagaaagcttgttttgttttgtttccaagtgcaaaaatctgttttaaaaatatatggaaggaaagacatgctttaaaatgttaacttttttggttttaaaaacatttttccttttatataaacttttttctctttccaaatctgctttatttataacttttatagtcagaaaaaaaggagaattttcattcaacctgatatatagccagagagaattacacataagaataggaatgtaaataagaatgatagaactgttttctgactttaaacccccacattgtttatctttaaatcacattcatatattatcttaatttttattattttctcatgctccaagtatagagacaaagtttatggagtatcgttacatgtggagatattgtgtcaagtctaccttacctaaataatgttataaaagatttcaaaaaatgtttccagacattgtcaataggataacagaacacacacttaaaaagttgtcaacagtgtcagaattataaactgcaaaattgaattcaaggacatttaaaaaattcatgcaatttcaatccttaataatattagggagcacacaaggaaattaggcagtagttcaagtctcattttgttataataacttaggaatgaagccagccccaaatggcctgagtgactgtgtcgtgcgctctatgttctggaagggaactttccctttggcacttgtcatttgaaactcaatccaatctcataagatatggcatgtttgccttattcttccataagaaatgttgtaattcttccttatgtgaatgccaaaatcttgagaggggcataaagtaatgctctgagtcactgaatcctaaaaatactgatgccacagtcaagacagagagaacatctaaagcacagtactaatattaataggagagaggaaaatgaagagtaataatgattattgaggaataactaacatggaatccttggatcccttgggttactatatgagtgtatattttatgtctgtataaattgagtaggatacaatttatgtctgtgtcatacaactgtaagtctgtgtatttttccttttttttttcttttgtctgtatttttgagggtgagagctttcagtactttcatcagatccaaaagggatacatgaaccaaaaaagatgataattatttcaccatggaaaagaagtctatcttatgaacaggctgggttattagttcaggtacatattatgtgagtttttcaggataccactgcacttccttcttgtttgcttgaacttaatgcatgaattacttgacatgcatcctgagttggaggttaactgtccttttccatttcctcatctagtgtgacttaagttcagatcaatcaaatagagtcccaggcctagatgatgcctcttctgtactttgacatatctggagaagggtctgtgaatccacacctaaagtgcatacatctagagatctcagtctgatcctgacccaaggtgggagtgagccgcttgtctccatcctttccctccactgaccccactcctccacatattttctggtagccccagagtccctgctatagccacctccacaggtgatggtgataaggtagggagaccggtgaaagtccctaacataagtccctagcatatggcctgactcatgtagaatgcattcaagaaatattgtctgagtgctttcttgcttgggacttttttcatccctgctaccttctctcccgtttactttgcttgttattgggttgagctgaggaagccatgggggttcagccactgtagtcaagatggtggtcatcagctagggtagtcctcaaacttttaatgcacatgtgactatcctaggtatctttttaaaagacagattctcattcaggaagtttggggttggggctcagattttacatgtgtaaaagttcccagatgatacaattgccgcctgtctgtgaaccactttttgataaccaaggagttagaacactgtatatcaaagatatgtagaccaaagaagctgaatgtagatgggggtaggggagttgtgagtgtgtactcacgagcacatgtatactcttggtcagttgtgggtttactttgctccatcctctgaatcccatcttaaaagcaaggattttccaagtcatccaaattaagttaggcttgaattgtgccctgggctctacctttaaaattagagtatatcacctaatagccatttttaaaaggaaataaaaacaacaaataagggaattaaaaagttgtgtgaaaaccaaaaatatagttgtaattatataaaaagagagaatagcagattgtaatgctcaataaagcatcaataggttactgtaatagcaacagaacagaaataaatgattaagagatatttaaaaatagattaataagaaaggaaactgaggttgaaatgaattagacgaaatggaaaggcatcagtgaaagaagcatttctaggtctgacctatggaagatggaataataaggaacagagaccctactcatgaaaattgattgttctggtgaagtgataattttcaaaacaatacatttaaaatttgaacagaatatactttctctgcataatgtaccatttttctgcagttcattaatggtttctcttctgttcagaattaggtatttgtcattaattaccataacatgtccaaaagtcatcaggtgaacttccctgaagtatattcttatattttgtatgactcaaatattaaagtgtacaaatagaaaaaataagtattgcataagtttccttagcttatgagaaacctgaccatgaatagtatgatccatggatattggatgtatacattgaggtggtgaaggatgtgaaaagaggagagttttcccagagcttcaatagagacagaaaggtcttggcacaagccacgtggtctctccttcagagaattagggaagtttagtagtaatatttctcatagagctggtaaattgagtaatatctcattattctgagattgtagaggatgagattcacaaagacaggaacaaaggtcctggggtataaatgggaaaagaagggaaaaattaatcttagctggataggaaggttagtattgagggagttatccaagaatcaaggttgtgacaaactgcctgaaagtaaaaatagatggagttgtaactgagatgaggtcttagcctccagtttatgttgagttccacatgtttgaatacatctgacatctttttgggaacaagctcatcacaagggcccaggtatacaaaattggccaaataccaatacctcaggcatttaaggctagattcaatagccctaaatagccataatagcactagcagaagcattaggtagtgtctggatattggaagaactgatttaactagtaagtgcaagataatgtgatacaaggcccattgccttgctaccaatagcaatgtagttagaataggctaaacagatgtaacaaacccccaaatatctagtggccaaaacaatatacaggctcatttgttgctcatataacctctccaagacagctgttcctacctccttgttggatcttctctttgtgacaattcagggacacatgctccttccattgcctggatatgcctttaactagggaaggaaaagacaatgtggaaaacaacttccacttttaaaatgctttggtccaaaagaggtgtgtgtcgcttctgctatcattgccattgatgatagctagtcacattgctaactagttatatagaaggctgaagacatgtagtctctagctgggtaaccactttgcagctacatttgtgtactattgaagactagggagaatgagtcttgatggggagcatgtcatctctgcttaatactcatgcaacagaaggtagcccaagagcgaaaggggcattctcttcttttctacacacagaacaggataacttctgtttaatgaggacctctgagaatagagtaccccatgagcatctcaggggtgccaagccattaatattggtgggactacctgcttggaggtggaccctgtaatattggtagatgcacctgtgaaagcacatatcatagcagcatgtatcagcaagagagaattggacataggaggagaaacagcttgtgtgcaaggttaaaagatttgttcatgagcacatgtgagagagaagccccaggaacaaggaaatgagaaaacaattactgcctcctacatgttcccagaggagggggctgggagagcaattaagcataaagagcattaattgcatagaagatgctgagggatcatagatttgaaagcaatttcaaaatatgagtattttaagacttttagcaagaacagacaccataggctgtatatagtttcctggagttatgattaaaggatgaaaacaacttttgtttagatatgtaggtaggtaagtaggtagatatagatagatatgagaatagtaagtttgtttaaacaaattattcattacatcatagtgacccttagtgctttttgatgatactgactgatatggtttggctgtgtccctacccaaatctcatctaatagctcccataattcccacgtgttgtgggagcaacctggtgggagatgattgaatcatgggggcaggtctttcctgtgctgttcttgtgataatgaatgagtctcatgagatctgatggttttaaaaatgggagtttacctgcacaagctttctctgcctgctgccatccatgtaagaggtgacttgctcctccttgccttctgccatgattgtgaggcctccccagccatatggaactgtaagtccaacaaacccccttcttttgtaaattgcccagtctcaggtatgtctttatcaccagcgtgaaaacagacgagtacactggcttattgaggaacagaatataatcagcctccttcattcctcactcactaaaccaatgtgctgatcatttctagaggcaaggacactccaagaatcaagaaagagccgatgatgaggctttctattattctcctggactggacgttgtctcagcttctgctgggccatagaaccctgcctctaccttgacttacccacatgttgttttggtgccaagtattgagtgctgcattttggggtgtacaagacagattggcatattgctaaaaatgtgcgaggacagaaatgacagaaactagtctgtaagattctcataggttccacttgtcttgcactcgtcatgtacaaaaatatgccaagcattgtagttcattaattcagtccttaccaaagctggtaaagcagttattaatttatccactgtaaagttgaggacatccagccttttggaaattaaataactcctccaatatcacacaagtaataaggaggttgtgcagaaattgaaaacttgtgaatttccaaagctcatgcccagctggaggttagagacatagggttcctaccaaaaatgtgttcctagcactcagcatagtgttcagcacttaagaggaaacctacagcagattgctaaactgggtatttacttacactatccaaaagtaggaaggaaacatacccatttgtttgtgaattattgtatcaaatcctattaatttcatcctaaatattaaataaaattcctaaataggaaatagcaatgttcatataaagaagcagcaaattaatttattggaatcgacacattcctcaaatggagatttggttgatattagagacttaatgtacctcccttagtgcttaatgtataacagagattccacttatcttacctatataacctaagaaatttgaatattttataaagttactttttagaaaacctgatttatttgttttccttgtcatctcagatggataccttcctctcaaaatctatttggaatttatattttcaagtattcaattaactaacatattaagcaggcattctcctgtgtaagttcctagcaacttttaccacttgtactaaaataaaacagatagttaagccaaatgagttaacttttctgaaagtgtatctttatacaacattaactatagacatggaaaatacatttattcacgttagaaataaatgcttctgtgagatctttcattttgataaagtcaaaacaccatcttattaataactactatattaattttgcagcaaattacaataagaccacactgtatagttgtgccattcagatgacatttatgaaatgctctaatttaacatggtgacatatattacctgcatcttttacacattatagcttatatcctctgagcgaaatagacctaaaccatccaaaaaaaaagagagagagagagagaataatgcaatgggaaattatacccctttgagaactagaaggactataattacattgcttcctcttaaaaccattcaaatatgtaaccattgctgggaacagcagtatgtggggaacctctttacactctttctgtcttgaacactcaaaagattgagaaaaaaatattcctttcctactatagttttatttgagcatgcttcagaattttacctttttgcacactccttagagattatcgtggggaagtttagaaagcagtttcttggaaatgccttttggaggggaagaggagctataaaaatataccagcctgacaaatgacaggcattgtagactggaaaagaaaagacatcttggttttacaccaatgtagaagcttttctttgcaaatgagtatttttgacagctgagcaagatgataaacagaagtatcacaaaacacttaaatggaaacaagtattatgatgtactttattcacctggcattctccaattcatgacatttatatgtggcagaacccactgcagattcatttatttatttttgaagtggaatgagttccttacgaaggtagcctgttacattaatgtggacttttcttctctagatgcagaagcttaaggaaaaaagttattgtatctgtactataaataagtggtaagtctcagaatccacatcttagggctgagaaggctcctagcaagtacaatatactgtataaatatagacaaataaatatagatatagattttttgtgtaagcaccggcagtgttgcaaatgattagatatttcataaatgccttttctaaaaaggtattgctgaaaccagtctatttctagaacttatattcagatgtttagaggtataaatgcttcaatattggctaagcttagaaaggctatgtttctctgaggctcagtgatagacataccaacaatttgatgagatgcatgactaagaagaaaaagagagtaagactgagtccctgtgaattgattgacttggtgcagtggcagagtaggtagcaagtattaaagcaatagttcttaaatgttagtgttcataagaatcatcaacagaactttttaaaaatgaagattcctaggttttaactttagcgacttttaattctttaggtctggtatatttggttgtgggaaatcaaaagactcaacttcggaatacactgaacagttgctgactatagatttgtatattcaaaattttttggtatttaaaaatggtatgtatggtttattgagtcaaatattttaaaaactatgaatgtgtgctggtttgtttttttttttttttctggattggaggacaatttggggtaagcattctctatttaacaagtcataattaactccctgccaaaactaagtagaaattgtgatttctataactcctatatttgataatatctcctaaaaatatttcagtgatatagcatttaattgcaaataattcatctagtcaccaaacaaatgtagggacgttcctatataccaggcactgtgcatatcaaggtgtatattacagtgaataacagaaacactcacgaagtgttcaattgaatttaaccttgaaatgtattatttattattattatgtttaaataaactatgtgaggtttttttttcattgccaatgagaaacccaccctaacttcagaatttttatctttaagtatatcctattttaaccacccttacccatccactctcaatgatttctcctcagtgtggggccttgccgtggaagtgtgccctggtcagtgagttttgagagtccgtggaagctagattgccctcggctcttcagttcccactgcagaactcttgcagtcactggctattggatcagcagaacctcttctattttcagtcgcccattttcaaattggctcactgaactttaggttctccagttttcaggtctttcaaaagtccgacacccctttactatcatctgctttctcctacacaggggctaatgccatgcaggttttgtgactgctggtggtgtgttcctacctgctttttttgggaggcttctgggcacagctggtcacctagtttcattataatcatttttaatggctttgctgttgttgtgttgctgtttagttctgtcagcttttatcctgggatttagagagacccaagagttctgtggccacataaccattgatcctgattcccctggagtctcttttgacttttactgcctaatttaagctgaacatatgaaatacatgaaaaaactgaaagctcaagctcgtttgttgtttgtcttcctaggttatggtttccatttctccctctttctcaacctattttgccaatcaatgtctatccttccttcactttttgcctactcactacaatattcaattacacaaacataatttttcctctgcccaccccagcaccagcatttttctgggagtttaagtctcttatgaatctgggaagaaaggaactaaaaatgagcagggatgaatagcaaaatgagtgagtcaacgagtagcaggcaggacattagagtgaagctgttttcttacccagaagactgatgatgggaaaggaaaaaagaacaattcaaaattagtagaagaaaagaaataattaataaaacatgagtggatattaatcaaatagaaattggacaaaaaatagtgaaaatgaacaaacgcaatagtttgtcctttgaaaaggttaataaagttgatgagcagaaaacacaaagtaccaacatcaaaaacacaaattaccaacatcagaaatttaaaaaagagacatcaatgtcgttgcacattttataaacattaaaaaattacagttttatgaacagctctgctaataaatctgatgtcctgaatgaaatgaacaaatgaacacaaaaccaacaacaaaaaatagaaatagcctcacatatattaaagacatttaattcatatctaaaaacctttcaacaaggaaaatctcagtcccaaatggcttcactaatgaatttgccactaacataaaggaataaataatattagtcctacacaaactctttcagaaaaccaaggaagggcatatatttctcagctcattttgtgagggctacctaactttaatcccataacctaacaaagcactaaaagaaaagcccattagaatattccatatgaacatagatgtaaaataccttaacagcatattagcaaatggaatcctgcaatatataatagggtaatgcatcatagctgattggatttctcccaggaatgcaaagttagtttaacatctgaaaatcagttaatgtagtaagccacataaatagaatacaaaagaattcccaggtaatcatctcaatagatcaaaaaactttgaaaaagaattcaaaacactttcatgataaataccctctgcctactaggaatacaagagaacttcctcaaactgaaaagggcatctgcaaaaaccctatagctaatattatgttaacaataaatgttaaattttttaccactacatcaggaacaaagcaaggaggtttgctcttataacttctactaaaaattgtaacagaagtctaaagtaggacaaaatgaaaaaacaaaaagccatgaatatcaagaaagaagtaagactattattatttgcagaaaatatgccactgtatagacagtgggagtataaaaattgcttggcaagcatcaagtcccccacatacaatcccctcctcacactactctccttcgtaaagccatgaaaaaccgctttatattctaagtaaggacgggatgtttgatgtgcaaatgcagctgtaagataaatccctgagcaacatttttggccaccctgcccttcctatagaaagtctggggctgtcactgaggtagggttagtaatggtatgtgagactggagagatatgtggaaaccacctcatggtatttggtcttcactagttaggcaatagggagctattgaatatttctgagcacaggagtgacacagaggtgtaccaagtaggtaagaggcagtggaaacaatctacctcagtggggaagagtattgtatcacaaaatttgtttagaattgctagtacttggtgataattaaaagcaaaacaattttaactgaatcttattattttaattttacttacagaaagtgcatcctcttttgtgtacccaggtgtttcattctcaccaccttaccgtaggattattatcatcagaattaaagtagatgaggcaaggcacagtggctcatgcctgtaatcctagcactttgggaggctgaggcgagaggactgcttaaggccaagagtttgagtttatggtaagctatgttcgtgccactgcactccagcctaggcagcagagtgagaccctgtctcttaaaaaaaaaaaaaaattggaatgaatgaaaattaattgatagcagtttattaaatggattagggagaggaacagactggtagatatcattcagtatacaatagctggttagtgatggcaattctgaaagaagaagtggtagaaactgggaggtgttgctagtgtagtatgacctttcaaaactcacagagtgcatagcttgtggatgtatagaacaatgtgaaagaataaattctccagaaaggaagaagaggagttagagattttataaaagagaagtctatgatgttctctaggaaagaaaagaattttctgaagaatatatgcattgattaaatgatttccttttgccctcatttatatttattttctgttcaaatgaaacacttaaactaacactcaatttccgggacagatttcctgttcttacattcttcaatttgctttttaaatttttactttgtttagcaatatcaacattgcctcattggcttttagtgagtttcttgagaagatgtaatctatagaacattagttcttctctcccaccagacagatgagtgcatagaaagacatatagttatactgctgctgttttaaaagtgttgcttcaaattacctaaaatatagtgactattagataatcactgataaaaactgtgttcatctaatttattcatcttgaaatcatgcttcatatttcctttaagcacaaaatagttatgttcacacatgcacaataaatcatatatggattacttgatgccttgaattcaccctcatagaattttatctcctaatgtaaagaaaactgactggggtaattattgcaggatcttactcttttctgttgtcagtaaccttcccaccaaactcattgtgacaattgtcacccggttgactgtgcatatccaccattgctccagagcctaggccagcagacttttgctgcatggtccaaaatggtgaggtcctgggtgtgatcacaaggcaatatgcagcaaacattagtgaccatcagtgctaacaaagaaacttacaaagtaacaacttgaccacttggccaattcttccactgtgttttcagctcttcacaggtgtaggccatgccttaaacttaattgagtctagcactcttcctgttactattattatatttgtagcttatgataagcagagtgaatttaacataggggttatgatcatgcatttgagagttgggccacttagtaactgtattagtccgttttcacactgctgataaagacatacctgagactgggtaatttatacaggaaaaatttatacaggacttacagttccacatggctggggaggcctcacgatcatggcagaaggcaaagaggagtaagtcacatcttgtatgggtggcagcaagcaaagagagagcttgtgcaggggaactcttgtttttaaaaccatcagatctcgtgagatttattcactatcatgagaacagcacaagaaagacctgctcccatgattcaattatttcccactgggtctccccccacaacacataggaattcaagatgagatttgggtgaggacacagccaaaccctattggtaactgcaccacctttaataagtaatttgatctttctaaggtttaaattcttcttctgtcaaatgaagattcatgtattttcacaaataataaaatgacgaaaattcctgccactatggagcttacattgtaaagtgatttggggagttggaagagaaagaacaatcaataaatataaaaataagtaagtttatttactaagttaaatgctataggagaaaactagacaaagtaaaatgccttgagagtaccatattaaggaaaggaattgcagttttggaaatgtagccaagagacttttaattgaaaagatggcatttcacttgagacctgaaggagatgaaggagttagtcatgtggaaatctggaagaagagacctaggcagaggcagcagcctatgcaaacaccataaggtggaagcacccctgatgtattcagaaaaggggctgtatagctgaagtgagcagaagaaagagtaggaatgtcccaagcctacgggatccttgtgcaagctgcaaataattggtcctttcactttgcaagtactgccccacatccatcaaatactttagaaggtttgaaaaaagtttgactatcaatcacttgatgaattttcctgcccactatttgctctataccagtgtgaaatgtacagagtaatacttccacttcatctttaccgagcacttactatgttccagagatgatgctaaacatgtttacattaataatctcagttaatcctgacaacagacctatgaggtagatattattatgctcattttattgataaatacgtgaagacttcagtagatttaagttgttcagagtatagttaattctgtggctagtaattgtggcacataatcctaatgttccaggaatttatatcatttagttgaggagacactcctcaactcctgtctcaggtgacaggagtaagtgaaattctaaggcacaatatagcatggtgcataagcaggcaggactgcagccacagaaccctcaattttaattcaggctaagtcacttactttcccttttatgttagagacgtctgttagtttttctacaggaagtataatacctcacagggtaatttattcacaaatacgaaaacatgtataaaacatcatagcagtctgcctgcaatatcgtaagtgttcaaaagggttgtggatattattattgttgttgtaagctaaggaacgctagaaaaacatcaaagattcaattactcaaaataacttttgctgagcatctactacatgtaaaatatgtatactgtgggatcaatggatgatgtaaaggtgcaaaaggttctggcccttggggagtgtatggtacactgggaagttatattttcagacaagacataataattctaatacaagctagaccttaaggaattgaatgacagaggtaacaagaaaatgctgtaaaatggctgaggagagaaaaatcctctaatttgggaggagctcagtattgacaaaggctagaaatgggtagagaacactttcccaaaagagatgtcgtggtgcctggtgagacaggctgtgaacttgacttctcccatccgttccattattaatgtgtgtctctgtgctctagcattcatttcatcttgtggacatgctattgtttccatttaaaaactctcttgatcacaatttcttctgtggcgatggtctcatgtcctgctctcctttttggcaaaactccttaaaagacttgtctaggctcatgcctccaaatcctattctgctattatttcctggaaatatatctgtcaggccttcactctcatcattactttgcaacttttcttgttaaggtctccaaggacctctgtctttttaaacaaagctaaattctgtcttcattgtatttgacatacaagcaggatttgacacagttgatcactctcttttcatttagaggactccacattctccgggttttcctcccatatccctgactatttcttctgtatcctttttctgtgccctcctcttacctttgaacacttattgttggagtgctctggaactctctttagaggactttcctgtatctacgctcacgcccttggtgatattttacttcaaataccaattatacacagacaatactcaaatgaatttcacaatcatatttccaattaaacacttaacatgttttatatatatatataaaatattatttgaatttaattatctttatcttcacatcaatacataataatctatcagcaaatcatgttggttctattttcaaaaatatccatagtctttcattcttcctagattcaataattcctttgcttgtctatttagttttctatatgtcattaatcttcctcatgctgacgtctttgctacatgaatatatacatatatatggtacacatacatatatattttatgcacacacacatacatatttatgctcaaggacctcctgccctgctatcagcctagagcttttcatatacctctacatcctcatttcctgaatcccatgccttccattcttgttgctgttgtctgtttactttctttttgctggaactatattactcaatagcttcctgatataggaagttaaagttttgaatccttgcaaatccagaaaatgtttgtattctttctttacaggcaaccgataatataacttagcatagaattctggattagaaataactttactcataatttggaaggtaccattcttagctttttagtttactataatgttgcagaatactgcagtgatattctgtattttctatgtgacttattttattggtctctggaaatttttgtttcctttttatttttggaatttgaatgcttcatgagattgcaccttgatctgggtttttccaccagcatgtggtgagccttttttttaactttttaatattttatttttaatcaatcaacacataatatttatacctattatgggatacagagagatatttcaatacatatgtaaaatgtgtgagtatcaaatcagtgtaattagcaaatccattaccaccaacctgtatcatttctttgtgttgggaacattcaaaatcctttcttctagctatttgaaaacatataataaattgttgttaactatagtcaccatacagtactataaaacacaggaatttattcttcttacctatctgtgattttgtatctgttaaccagcctctccctatccccttctccctgctatccttccaagactccagtaaccactattcgaccttctactttcatgagatcaactggtttagcttccacatatgagtcagaacaggtaatatttatctttctgtgccaggcttatttcacttaacataatgtcttccgggctaaacataatgccctctaggctaatccatgttgcttcaaaagacagagttttattccttttcatggctgaatagtatttcattatatatttatatatgtgatatatgatatatatatatatatcaaattttctttatctattcctttgctaatgagcacttaggttgattctatatcttagctattgtaaatagtactgcaataaacatgggagtgcagatatctcttcaacgtactgatttcaaaacgtctggatatatgtacccagtagtgggattgctgaatcatatggtagttctctttttagtttttttaagtgaccttcatacttttttccataatggtatgctaatttacattcctaccaacagtgtataagaattcccttttctctgcatccttgtaagcatttgttattttttgtcatttttataacatattttaactgggaaaagataatattgtggcttttgtttgcatttgtctgatgattagcaatgttgagcattttttcgtgtacttgttggctatttgtatgtcttcttttgagaaatgtctgtccagaccatttgcacctgttttaattggattatttggggccattgagttgattttcttatatattctaggtattaaacatttcttggatgaataccttgcaagtatttttccattctgtaggtcgtctctccactttgttggtagtttcttttgctgcgaaagggcattttagtttgatgtaattccatttgcccagaccaatgtcctgaagcacgtctcctaggtttacttctagtattttcatagttttgggtcttacgttgaagagtttagtccattttgagtggatttttgtatatggtgagagacgggggtctattttcattcatttgcacatggatagccagtttccccagcaccatttattgaagaggatgtccttttcccactctttgtttttggtgactttgttgaaaacccgttggcagtaaataggtggatttatttctgggttctctattctgttccattggtttctgtgtctgttttacgacagtatcatgctgtatagctttgtagtaaattttgcagttaagtagtatgatatcctcagtcttgctctttttgaacaggtgactttgtctcaagattgatttgtctagctcagtggggtggctcacgcctgtaatcccagcactttgggaggctgagttggacagatcacttgaagtcaggagttcgagaccagcctgaccaacatggcgaaagactgtctctactaaaaattcaaaaattagcagagcatggtggcgggcacctgtaatctcagctactcaggaggctgaggcaggagaactacttgaacccaggaggtggaggttgcagtgagccaagactgtgccattgcactccagcctgggtgacagagagagaccccacctcaaaaaaaaaaaaattgctttgtctattctgggtctttatggttccatgggaatttaaagaattttttcttctatttctgtgaagaatatcattagtattttgataggaatcatattgaatctgtagattgcttttgataatacagtcatttttataatattagttcctctaatccatgatcatgggatgcctttccattttcttatgtgtcctctttaatttctattataagttttatagttttccttgtacagaacttttaccctttggttacatttattcctcagtatttttgtttttttagctatcgtaagtgagatttcatttttacctagtttgtgcttgttgtataggaatgctactaatttttatatattgatttgatatcctgcaactttattcgtttagtttatcacttctaagagttttttggtggagtgcttagtttttattacatataagatcctgtcatctgtaaaccagaactagttgacttcctcctctccaatttgtattcctgttatttctgtctcttgcctaattgctctggctaggaatttctagttctaggttgaataaagagtagtgaaagtgggcatcaccatcatgttccagttcctagaagaaaagttttcaccttttctccgtttaataagatgttggttgtaggtttgtcatatatggcctttattattgaggtacatttcttccatactaatttgctgacagtttttagcataaagggatgttgaatttcatcaaatgctgtttctgtcttttgagatggtcatatggtttgtccttcattctgttgatatacttttatttatcccatttattcaatttgctcatattgaatcattcctacatccttggtataaatcacacttgatcctggtatgtaatatttttgatgtgctgttggattcggtctgccagtattttattgatgatctttgcaactatggtcatcaggaatattggcctgtagtttttgctgttgcatatttggttttgctatcagggtaatgctggccttataaaattagtttagaagaatttcctctccttcaattttttggaatagtttaagaaaaaatggtattagttcttctattaaagtttggtagatttcagcagtgaagccattgatcctggacttttctttgttgggagactcttaattactgaatcaatctcattacttgtgagtgttctgttcagtgttctattcctccttggttcaattttggccagttgtatgtatccacaaatttatccatttcttctaggtttttcaatttgttggcatatagttattcataatagtctccaatgatcaactgtatttttgtggtttcagttgtagtgtctcctttttcatttctgattttatttgagtcttttttctttttttctcagtctagctaatggtttgtcaatattatctttcaaaatatcaactttttgttttgttgagcttttgtattgtttttggtctcaattttatatccttcttctctgatcttttttatttctatattgtgccttgcagaggacctttctagttaaatacatttgggaacttttgagcttcctggatctgggtatctatgtctgtcccaagacttaggaagttttaagttagtatttcattaataagtttttattaccctttttgtcatcttgtctttctaagctcccacagtatgaatagctgtttgcttaatggtgtcccacaagtcctgtaggctttctttattctttcttattctgttttctttttctttctgtctgcttgagttatttcaatagacctgtctttgagttcataaatcatttttttctgcttgatctagcctgttgtcaaaactcttgattgtatttttatttcattaactaaattgctcagctccaatatttctgtttggttcatttttatgataccaatttcttgttgaatttctgatttagatcatgaattcttttcctgatttttttcagttgcatatctgtattttcttctatcttgctgagtttccttaacatcattattttgaactccttttctggcattttgaaaatctcttttactttggggtctgttactagaggattattgtgttcctttggtagtgtcatgttttcttgctttttcatgtttcttgtgttcctacattgatacctgcacatctggtaaagtaattgcttcttttaatgttatggactagcgcttatagggaaagatttactcctgtagataagttctagagtgttaagtagagggtgataacttgggtcctgagtgggcacagtagtgtagtctctgtgaagtttcttcaactgtaatccatgtcagtaatgtttgtgaatgcttcactgacctaacctgtgggagtttgtggcagcagtgacatgactttactggaatcaggcttattgagtgagttatcaggatggaggcatgtttgtgcatgtgatgggtcacctagcttaggaactggcttgctttgggtgaagccgtgggctgtttctcaggccgggggcatgagtgttcagtggatcagctggttctggaactggttcaccaggagtgaggctgttgggtcgtttctcagtttaggggcataggcacatgttggtttgccagccattaagccttttaaaactatggtttcatgtctggaaaatgtgtattttatactaattctttattaacttattcctttaattttttttccttttggtgtatttctgaaaatttgttttcatctcattattattgttagcctttctgatgtattttcttatctttctcttctaatcttttagttgagatttttttccagcctttttttttttttttggatatagaatcttagtatattgtctaggctggactcaaactcctgggctctaacaatacttctacctaagcctcctgagtagctgggactacaagcacatgccactatgcctggctgtatatttttaatatttaagaattctttctttcaccaattgtttattcttttaggcttttttttgtttctatattttttaatgaatgcaacttttatcttctggggataacagagatattttattaaattgttattagttgatgatttcttccatctctaattccctgcattgtttgtttcctcatctggattatcatttttcatcctcctcctttatttttgtttctgtcattcacattgtatattttgcacatttgatgaattttgccatctgctttattctgtagagaaatggtaaaacatttccaaaatggcctttactcatgtttatgagcagcaatacagctttactttgcagaggttaaaagctcaaatattagttctagagttcttatctttgtagtatttttctgccagtttcctctttatggaaaataactctggctcccggctttctttaaactgtgtagaaggggagttgtggtggtaaaggggagaggcagtgtatacagactttcacttaatcctttcatgtctaccttgtgcctcttccaataacaagttgttgatgttccaatataatggagctggttaatttcaattattcttgacaataagactgatgtcactgtggagtaggattagtttggctggctgagtggggttgaaaaggggacctgaaaatctaaatactttctatgtggaatacctctaattcatgattctcaaccttggcactatggctattctgggctgggtaatttgttgtgagggatggatatgtgcattgcaggatgtttagcagaatccctggctacatatcagtatactacatgccagtagaactcctcccctcactgggacaaccagaaagttcctctggggacaaaatcttccttagctgagaaccattgtttaactttagacctgtgtgtgtcctcttacttctctcaatgtttcattatcttcaagtcttaaggctctcaaagattctataggaaaaatcagttttcatgttttaggaatccaattcagctagcactcaagctgtaacttctctgattattcaagaatgttgtcaatatttatttctatttcttaatttcattttctgtcttcaaaatttttgtaaaatgtatttcttccctattgatttctctgctggcctcattaaaattatgggttatattttttaaaattcctatttttttaattgaagtatcaagaaaaagaggaaaaggcacatgcttgatctgaactttatcaaaaattggtaattgttttcatctcttactattaactcttttttaaatcgatcctcttgctttaggaatccaaatcagcctgcactcgtactgcagtttctctgattagtcaagaacgttgccaatatttatttatatttcttcatttcatttttcgtctttgaaatttttgaaaaatatatttctccattattgttttctctgctggtctcattaaaattatgggttttacttgttaaaattgctgttattttaaagtagtgagaaaaagaggaaaatacatgtgcttaatctaaattttaccaaaaattttatattttagtaaatgtattcagatgcatatttttctgacaatgggcagtcttagttaacacctgtatcctttttcttgagcaagaaaataaatttattataatttttacttattctgccctagtattcctcatggataaatcgtgtcttaattttattaatctttgaatgcatcaattctaataagttggatcctttgtcagaaagcagaatgtgtacaatatacttatcccttagttttgtcttcctgggaactggctcttgatcacaataggatatatacctacagatcagcttcattataatttaatttactgtatttggcagcaacatcttctagtggtaacctagaccgagatgaaatattccatttcaattgacagttataaagctacagaccatagatttcagttatttgagtagttactacattaaaacacatctttttttcccttcctttgctcccaaccacatgtgcagcaaccagtatgtttctaaattttgctcctgtttataatgctatttcttaagcttctaaacatcgcagtgtgcatttcacctctgctaatctccatccaaattctgctatgttttggagtttgtaagaaagtgtagtgctgatgaggggattgaagtttcaggattccaattttggctgcttaacaggaacagttgaaggatggcatgaggtttttgatccatggttttccatttccctggtatagtaagcataggtatcactgccaaacttctttggagctctatgttatttgggttgagagcttggagctatgttaaacagctgaataaatgtttcccaatgcagctctgtctatgatgcagctcctgaaaattctctctgaatgttgtcaactagttttctcttaaattgagtttatagttgttttgtcaggtccaaatgtctttttgagactttactttgactgaacattgtgatagaatttatcctcctgcttgaaatgataaaaatatggacaaaatgtattaaataattgtttgctagatgttggacatcaggcaatgaggacaatgtttgctgagaaataggaaataaattatgtgaatcttacaattgacccggattactgcttacagagtatttctagaccacgacttagggagagaaatcccagatggagctcagagagttctccaaattgaagagatatagccaagtgtttcaggaattcaaagtagttagagtttgcagagagcagatagaggaacacagagataatttcacagatctacagagcatcttccttaagaattcactttactacggttcactgcatgtatgaggctgcagaaagcacaactttcaattattaaaagtaacaataattaacactcatgtaatgctgggtatgtgcctatttccactagctgaactggcgagaaaatttatgattcgtgggatatttgataagagtacacaaaagggtctagcctcaacagtggagaatagccctaggctgataactacttcaataccacctaataaatcttaagagcaagactcaaaaggaactgtttccaagtaatttaactgcatccaagaacaaaacacaaatatatttgtaagaacactgaaatatgtagtacctaacaagaaaaaattcacagtctctggcaccaaatcaaagattatcaggcatgtaaagaagcaggaaagtacaacttataatgaggatgtaaatgcatcaatcaaaattgatccagaattgtgagaaatgttagaattatcaggccagtatgttgaaacagatattacaactctacatagtttaaaagctacataaaaatatggaaggtactaaataaccccacagatcaaaattccagagaaaaacctacactgtatggaatgaaaatacactggatataattgattatacattaaacataaaacatttatgttatatataaaaaattagtgaacttgaagtcatagcaatataacctatccaaaatgaaacagagttgaaagagcatttgtaaaaatgaaaacagcatttgtgagctgtgggacaacttttagaggcttggtatatgtgtaattggagtccctaaaggaatggtggggtggaggtgggaatataaaaaatattcaaataatttatggctgaaaaattccaagtacagtacactgaaaaccataaagccacaaacccatgaatctcaagaaaactaaaaaataagtaacatgaaggaaatcacaaaaggcatattataattgaattgctcaaagctagtgataaatttttaatgataaaataaaatactacagcagccagaggaaaaagacgtgttaaatacaaaggcaaaacagtaagaatgacaacagatttcctatccaaaataatgcaaagaagaagacagtggggcaacattcttataactatgaaagaaaataaatagtgcacttatgattctatatctagtaaagatatctaagatgaaggtgaaataaaaactatttgcaatacatataatgaaagagttcatcacacagaaacctatactataagacacattaaaaagaagtccttcagtaggaaataaaatggtatcatatggaaatatggatctgcacaaagaaacaaagagcacccaaaatggcaactgcattggtaaatacggagggtatttttctaatgatttaattttctttaaatatagttgacagtttaaaaaataataataatatagtaaaagttttataacatgtgtaagtaaaatgtttggcagtaataacacaataattaagagggggaaaaggaagtacccttgacccttgaacgacatgggagttaggggcactgattccctgcacagtcaaaaattcaagtttaattttgactctccaaaagcttaactactaatggcctaccattgaccaaaaaccttactgataacatgaacagtcaattaacatttattttgtatatattatttactgtattcttaccataaagtaatctagagaaaagagaatctttaggacaatcataagaaagagaaaatgtatttactatttgttaagtgaaagtggatcataaagatctttgtcctctttatcttcactttgagtaagatgaggaggaggaataagaggaagaggagagattggtcttgtggcctcatggctggcagaggtggaagaagattcttttataagtagactcatgcagtgataacccatgttgttcaagggacaattgtataccgttgtaagatccttatactctatttgaagtagtctgtcacttaaagctaggctgtgataaagatgtaggataaaaaccactaaaatcataaaacaaagagttataactaataaaccaacatggagataatttgaatcataaagaaatataaaataacacaaaacaggcaaaaaaaaaaaaaaggaaaaaagaaatcccaagcagatgggacaaataggaaatatcaagataatagatttaaacataatcatatcaataataatgctaaatttacatattctaaatactccacttaaaatatacagattggaagattggttaaaaaaggaaaaagtacaacttaactatatgctgcttacagaaaagatatttaagtataagacacaactaggttaaaagtaaatgttggaaaagataaatcttgtgaacactaatcataagaaatctagggtgactttattaatatgagaaaacatgaatttttagaaattttgtccaagataaaatattgcccaggatgaagaaagtaatttcattttgcaaaaggagtcattttgtcaataggacataacaattcttaatatttctgtaccaacagcagagcttcaaaatgcacagagcaaaaactaacgtaactgaaggagaaagtaaaatccacatttgtcggcaaaaatttcaatacccttctctcaataattaatagaacaaactgacaggaaataagtaaatctatagattagaacaacactgtcaaccaacttgacccaatggccagttatggaacattcaacccaacagagcagcaaactacacctacttttcaggcctacacaaaacatctaccaaaataaatcaaattctgaaccataacacaagcctcaatagatttaaaagaattcaaatcatataaagtacattatggggctgcagttaaattaaattagaaatcaataacaaaataacctggaattactctaaatatttggaaactaactaacaaaattctaaataatccaagattagaagaggaaacccaaagaggaattaagaagtattttgaactgaatgaaaatgaaaacacagcataacaaaattgtgagatacccaatatggcaggacttagtagtatattaatagcactaaatgcctatgctaggaaaggatgaagatttcaaagaaatatcttctactttacaaaactagcaaaagaagggaagacccaagccaggctaatgaaagctatttctgagtttctaactgcatctcatggggatgatcatttcttttctctgctcttgtggctgaaagcatgttaaggccaaaattgtgattcaggcaagacccaaatttataagaccaagattgcattttaagccataaagagcaggagaatctccatggcttgaactgtgaatagatatttgtttgttatcagagatagtaattgtactgctttatctgtatttccttccatgttagtaaaagaaagctcagaagtagttgatcacatgatcatagagaataaactacatttctcagtctccttggcagctaggtgtagaaatgtggtttaagttctggtcaatgatattttatctattaacgtttgctgtttaagttagtggctaaaaacaataaaaattgcgtatttatttaggattctatggtttggctcagtgctggtgtgcactggcttgtccaacctcttctgggctctctcatttgtctgtgattagctagctggtcaagcagcagttagataggaagacctcactctcatatgtggtggttggcaagctggctgttcactgggacagtaggagcaattattagctggggcacctcagttctctgccatccaacctctaatattccagcaggatagcatgagcttgctcacaaggtgatctcagagttccaagcccagcaagaaagaatgaactctaaatttgcaggcattttaaattgtctgtttgaatcatatttgcaagcattatatgtgctagtatttggccgaagaaaaccaataggtcaatctagagttattgtggaaggatcgtaccaaagagtgtcttagtgtatttttaaaggaaaggggaatgcctttctctctttctacttcttggtggacagcaattggttttagagtatgagtagatttgtattttctcacattaaaaaggtagaatctacaactgtggaatctatagaagtaaactgggtattttcagttgaatcttgggaaactgactaaagttaacatttttaaaaataataatgctttattttatttttaaactacattttaagatatagttaatatacagaaattataatctatatgtgttacagagagattaatgaaatgggagtaaacttgttattttattaatttgtggcagagttcatatagaaagaattgtttttattgacaaaaatatctcgataagacttaggttttggcaagaatcaaggcaatattatacacttttgagatgtctgtgaaaaagtgaccatgtaaagtcaggtgtatagaaaaaagtgaatatgctttatagcagagcaaggaggaagaagagagaagccacagaagatggtagataattggagtgcaagatggtaggtaattggagtgccaatgaaaatctctagctatagggaaactaaagggatattatgaattgcaaagtaatgatttaattcctcttttaccccgaatctttaataaggtttaacgactacaatttgtttgtttgttttgaacaagacttcttgaaattgaggcattagctgagtttcacctctgggtgacatagggcagtgctggcagaagccagaaagacttcaaaatggaagaagcagaagtgtagggtcagggcgactacgaaatgatcaatacgcatagaattcttataaacttaaggaggacttctgtcattcagggatggaattagggtcataggctgccttatctagatttcaaaaggcaaggacgctccagatgatacatgcattacatgtaaataagaatacaacaaggccaggtgcagtggctcaggtctgtaatcccagcaatttgggaggccgaggcggacagatcacctgaggtcaggagttcaggaccagcctgaccaacatggtgaaactgtgtctctactaaaaagataaaaaattagccgtgcctggtggcccagctactggggaggctgaaacaagagagtcacttgaacctgggaggcggaggttgcagtgagccgagatcgcaccattgtactccaaatttgcaggcatttttaaatgtctgtttcaatcatttttcaagagttaaactccatctcaaaaaaaaaaaaaagaaaaaataacaaaacatataaaagataaaggttttgcacttttatttctctttaccttttgcacacttccttgctctttgaaaaagtattgtttacatgtaatgtttaagattattctttgacggaaacatcacatatgtccaatgccttaaggtgtttactatctctttggagaacaggactgatcctgtaaagtaccagcaaagactcaggcctgagttatgggttgatgtacttgaagtgttacaagtatgtacccacacgcctattggattttcatggtatgcctatatgttacacatatccaccaataaatgccatctatttttgtaggctgaatcaaatctctgtcttgagtaatgattttgtatcctttggactagatctgaataagactgagaaacagccaggcacaagaaggcaattcattgttctcactcatctttctaaacctatatgcatctttgatattgaggttcattattagctacaactacatttggtttgcatataaccatttatttttcagtcttagatattttcatatcaattgtcttaattatccttaaataaagcttccagtgagtctctatttcttggatgaggacaattgaggcagtgatagttctttaaaaattatttaatttctaagtccttcactatatcttgtaactgaatcccaacctagatatttttaaatatccttgaaattaaatataaatcaaataatatctttccacatgtaggttacttccctctatggtaactctgcctccaaatgtgaagagctggattcaatccaagtgaaagaaaatcagtggggaaaatgtcagggactataaaagagatttgaagtctgtacccacattgctgtgttagagtcctgagttattaaatttctcatatttatttgacattttatatacatatgtccacttatgaagagtttagttcttatctttctttaatcaacacagtattaactatgcatgtagtagatgaacactgtattttatgtatttgcattcttttcaaaccagatgcttaaagaataaaatgacacagtgttttagctgttattttgctttaaaatgctttaaaacaagaaacatttttggaatttcttatcacaatataaatcagctaagtatatttaatgtggtgaaatgaatcataaataggctgaaatagtcctaaaaggggagttgggtaagaaaaaaatgtattaggatcaatatcaataggcataaataattctattaacaaataacattaaacattgttacactgtttatgggatgatatcattatatcattatagaaagattctcccttaatttaaatacctagcatgtacaaaacaagtttaaatcaatgagacagtaaacaagaggaataaaatagagaggtgggctgggtgcagtgattcacgcctgtaatcccagcactttgggaggccgaggcgggcggatcacgaggtcaagagatcaagaccaatatggtgaaacctcgcctctgctaaaattacaaaaattagctgagcgtggtggcgggcgcctgtagtcccagctactcggaaggctgaggcaggagaatggtgtgaacccagaaggcggagcttgcagtgagccgagattgagccactgcactccagcctgggtgacagagcgagactccatctcaaaaaaaaaaaaaaaaaaaaaaaaaaggggaagtggtgtcctaaagactaaattaactgctgactattttctattttcagtctctacatatttatatttttatttctttatatagcattgaatggttaattccccatttcccttttattcttatacgactaacttctatgggttttattttcattcagttctgtatattccccctgctgaagcctcccatgttgtgtgtcaagaggaaaaatatcttattaccttcttgtctgttgaacatttagttttcttctccctccctccctgtcttgtacctaatgagcaaattatctaaaaatagatacgttcatcattctacaaaatgttgtatcttctctagattggaggacagtgtaattgtaagagacacgtgtctggcaggcagtgcaatcagtgccagaatggattctacaatctacaagagttggatcctgatggctgcagtccctgtaactgcaatacctctgggacagtggatggagatattacctgtcaccaaaattcaggccagtgcaagtgcaaagcaaacgttattggtacgtgtaacgcaaaagtttacagtcacatctctattaccatctggaataaaattctctatttgatttcttaactgaagagtaaagcaaatttctttgctcaagacaggctggaaaaaaaaacaatttggatgaaattaactgtttaaaatgattaaattaataattctatcaaactgcagcttgaagcttagtttaatcaaccctttagaagtttctttattctgtagatgcattaattcccatggtcccatactaataagtcatagaaaaatataatttgcttactgcatagatgtttcttttagaaaattagcactttttcaaaatgttttacacttaatgagttctaagcaaatcatttccatgctagttttcttaatagaccaaaataagtggattttttcaaaatattctgtgctacagggtcctttgtgataaatctttccatttttttctgttatatttctttgaactgttcctatgaaatgcaaaataagtcaacataattctacagatcatgtatattgctagggttacttacaaagggctacataattttaattttgtaattcagcaccaagttgattataataaacagctgccttcggtgttatttatcatttttttatacaagacgtgcttttttgtttgttactcccacaggtatttttcggaaattagatttgattatagcaatttattacatccaacatttttgaggggaaccaccgccacataaggacaaaatttatcaagtgcctaaaatgcactatgttcataatgcactttgaaattttgatatatgagaatattatgagaggaaagtttcctgatgaagtgagccctgtattgtaactgaatatgtcttggttcctataggaagtttaaaaaagacctttgcctttctattgtcattcaagacaccaagtcatccatggtttttctaacactgacctgaaccttacaatagtaaaaatatgcctggcagtgattacacacactcctctctctctctctctctcacacacacacacgaatgcttacatgtacacatgcatatgtacatatcattctgaatactattttcatttctgtgatatacctctaaatctaattctttatcttttatttatgtaagtgtacatcatgctacacaattcagctagacaagcgtttcaatttaataaagagaatgtaggtgtgtttagtggcattacacgagatttctctggtttaaagaaacattacatgaaaatctgtaccataatttacctatatgcatctcaagcatacagaaactaattttttagaaagaaagaataacgtgtaaagagaagtacatatttgtatgtgctatccatgatgctgaaggaattctaagaccctgaattcaatttgtatggcatcctttgttctttaatgtgagatatattttaaactcaagatgtgaaaacaaaagttaaagcaagacctttaaagacagtgaaataattacttctttgtatcaatggaatctttcttgtgatggttagattccagagcttgaggaagggaaaaatcaaaattaatttagaatgtataatgccatccctactatttgcctgttttgttgattgatccagatggttttctgcaggaaacataaatatatattttgtgaagactaaattacttcagtattataaataattattatttctagtgttatttctgcaaatgtagtactttttataaaaacaaaaacttgatatgcatatatatttactttcctaatgggatcagcaagtaactttattcaatttcaccttgttaatatgaaaaaaaaagaagcccagaaaatacaagtgtatgttgtatacgcttcagaaagcaaactgttagagttaacaaaactgttaaatcttactaatgattctatcaccagtaaaatacattagcaccaataattttattaaagtaggtcattcatctagaataaaaagggagaagaatgtgaattaaatgccaagtgtgctaactcgcctgtacttgttaacaccgaatgtgatgccctgtaggccttcctgactatcgttaggaatagattacctgtcaggaatatgtatggcatattcaaataagcactgtgcatatttttaaaactgatatgatatgaatccatgtagaccaattttaatagttcaaaatgagtcataattcttgttaacaatacagttatttttaaaatttgcagcaatagtggtccttttttattttccttattgaaattaaatgatatgccttaggtgagtcattcatcactgttaaagaacttgccttcattggagttcttgaatttttatccatatatatacatatatattatgtatttccttccagtttaggaaatgcttttctacatatgagttcctgagtatgtttttgactcttattttaagattaatttttaaattgcaattatagcttgaaataaatgtttcagttgattcaacccatgcagtgagttatttaaattcatggatatttggaaactatctaaaggaagtattttgcatctaaacatttactattctaatttttttatttctttgccttgtaatacccttttatcttttagaataaccttacttgtcagagatttaagtttaggtgataaaacatttttcttcattcgtaaaatgtatatgtgtactcctttaaatagaagtaatataaaaaacagaatttacttagtgtttaaagaggtatgttctgagtcacacaagatgacaagcaatgtgattgctttatgagccaaggagagcatgatttatattaattgaaaatgataaaatagaggagcatacaaaaggattaaaccaaaaattgccctggataagttttatttatattaattacttaaatgtgtggattcagaaataagtgtatatgctgttttcacaaaaatagttatcagctgacatttttttcttttttcccagcttcacgaaggtataattaaataaaaattgtatatatttatggcagacaacatgatgttttgatatatgtacacattataaaatgattaattccagctaattaatgtatccatcacctcatgtacttatcatgtttttggggtgagaacatttaagatctaatctcttagcaattttcaagtatacaatacattattattaagtatagtcaccatgctgtacaatagagctccagaacttattcattctgtctagctgaaactttgtactcagcttaaccttttattaaacatctttagagatttcttatctttagaaaaacaactaatttgttatatgtaattctactataattttaaatgagcacatttgttaaaatagtttttaagatttgttaaagagaaaaagagctccagcatatgtaacagaaacaacatttgcattaagcatttttctttgcattaagtaataattaaaaatttatgaagttcatcgcaaacagttgtatattaaagctaaattaaatattgtcattgaattttgagagtaagattggccccctatggcattgcttgtgagaaaacactcaatattttgtgttcgtatcatctgcagtagcattgtttgtgtctcgtctatcttgaatgaaatcattttcccatcctcaccttttaaatatattttatctttagggcttaggtgtgatcattgcaattttggatttaaatttctccgaagctttaatgatgttggatgtgagccctgccagtgtaacctccatggctcagtgaacaaattctgcaatcctcactctgggcagtgtgagtgcaaaaaagaagccaaaggacttcagtgtgacacctgcagagaaaacttttatgggttagatgtcaccaattgtaaggcctgtgactgtgacacagctggatccctccctgggactgtctgtaatgctaagacagggcagtgcatctgcaagcccaatgttgaagggagacagtgcaataaatgtttggagggaaacttctacctacggcaaaataattctttcctctgtctgccttgcaactgtgataagactgggacaataaatggctctctgctgtgtaacaaatcaacaggacaatgtccttgcaaattaggggtaacaggtcttcgctgtaatcagtgtgagcctcacaggtacaatttgaccattgacaattttcaacactgccagatgtgtgagtgtgattccttggggacattacctgggaccatttgtgacccaatcagtggccagtgcctgtgtgtgcctaatcgtcaaggaagaaggtgtaatcagtgtcaaccaggtaagaaagaaatgtattacattttcagtgcacaatgacattccttttgttaacttaggtaacttctccctgtttctggtttgtggcttctacaaattttatttccaaaatcattactgtatttatatcattatccaacacatatataactatttaacttattcaaaattatctgcatatttatgttactattttgagaggatactttagataaaactcagccgatcggatttatttcataattgagactcaatttctacacttgaagtaaatctcctttttaacagttttttaaaaatcagatcaacaagagtcaattttattttccagagaaaggaaaatttgagttgaatatccatacaatgccaaatattcaaatgatgaactaaatctctgaataaagctggctaaatgtttttgctgaagaggctatatgttctagttttatatagaaatacctagaattgtttccacatgccatcaaattaataaaataggccactgtttaatctcattatatacaaacttatctttccatctctttcccaattgggagagggatagaccccatctatggctctccttacatttaagattttaactaaaatactataccttctttacaataaattcattatgatatgatgataaatataagtacttatccgttgtttaacagctgtgctaattgttgtcctgtcagccaatattagctctgagttatatgggtctataaaaatgagcatgataccaactcaaaagtgtgatttgcttgccagagaaggagtagaacaaaagttctgttaacatagcaaagaatccagcctaggataattgggccatgcttttcctttggcattggtcagtgtgtaagatcaaagagacaagaaggaattgatgaagagttcattctttttgtgatgtaagtattaaaaaacaacttgaactggtttaaacataaatggagactatattataactagatactccataaaaacctaaggagaaggaccactgcagtcaggactcaggaattagaatgcttccactgatacatattcatttgtctctctctctctctctctctctctctctctctctctctctctctctcagaaggggactttacctctctctttctctacatgggtatatggccaccctatgtcccctgaaattgtttataattctaccaccagccacaacagagcgatttattagctacctcttagttataatttctagaggaaaattcgaattgactcagttttgtttggttggttacctctgagccaattcattgtggccaggggtgtcacgtacttataaaatgagtatagcttttagggaccatttcatcaggtagaagcaaggtggtaagtatcccagaagacaggaagattatggagacctgggcagacagcctaaatgacagatacagcacattcactctttttaccttcaggttaatcctttcaaatttgcaatcaattaactttttgatatcctaagatgagatgtttttttctcttttagtgtttatcaatatctctaattttggcaacaaagtcctttgtctcctacacagtcaaataaccatgatttatacatccttctttctaagtaaaccaaaacaagctaatagatcaaatgttatatccttttgagtaattatcaattgttaaaatttactgttccagtctaactttaattgtatgtataatacaagtcacatgttttaaacaatttttctgattttggaaaaactctgaaatcatagttacaaacatttgttccctttggtccttccaatgaaagacccaatccatcatctcaatactttgtacacctaccagatatctaaatgatgaactaaaattgttagaaaacctttgtttttctggttgttttgcatatcattgcagaaaaagccatggataatttaatctacaccatgcataagactgtctcatttgttcccttcctaggatgaagaaatactgacttcattgctctttcctttatctttgtggctctcattgtggtgatctctttgttcccaactctaagcccttttctcccacccaaatctatggctctttcctgtctaccctatatagtattggcagaataattcccctaaagcacttaattcgttatgtcattctcctgtagggttaccaaaaatgggttttattttgcttatcatttgagtccaatctgggcaaacctttatgagtttttatcttccagtcgcagtctagacacctagctttgcttcctgatattccctttctcccatcttcttcagtcactgcagccacttcactggagctacacatgtcacatgcagagccgatttcaatctacctgatgctttggttcattctcctttcccgacatggaatgcagtataatcctccttttcaatgttagttggcatcctctgactagttttactactcaacatactgcctaaaattctccatcactcagtgaacaacaaagttgacatgagcatcagtgttttaagaggtggtttaactcaaacctatagaaaacttgaaaataaggtgtttttgaaaatgtgctcaagcttctattgtcttcatgttcaatttattatatgaccttgaagagaggtttatgttcaagaaataataatacagatctcattgtaattaccccataattatgcttcttttttctgaagaccatatggacctataaatgaagtcaatgagttaagagtagggagcattaaacatggtgaaaatatttttatttactgaaaaaattcaacagcgtattgtaaaatatttagtagaaaatgtaccagactgagaaaacatatttggagctccatttcttcagcttactgactctctaaaggcattcccctgtccttctctacagggaacttccatattttcttccaactgtccatttctagccaggggtaagcagatttatctttaagctgttacctgagtggagcctgtatcagttctactcatatcctattgatcagagctgctttgtatatccatacctcactgcaaaagaggctggcaaatagatgctctatctgaatatcaaggtatatatttaaaacttggggcctcttttattataaggagtaagaaagagattgatccttgaagacagccttggctatactaggaatgtcctacacctaaaaaaattagctggcagaacattagtcaacttccgaatagatgcttttaatgaccatgagttttgtacttttattgatagatcccattattatcattttttaaaaaaatcagccaaagttaatgaaggcctcttgagtcctgaggaaatatatgcacaaaatcccttcttgggatcttcgactgtttcttacatgctttgccttatagactcactgctattctagtcactcttccttccaaggacatgctacagtttatagtggccctgctgagttattgacccaggatattaacctggttatgaaaagctagaatgatcaagctacagatttggattattatattttgttgaacagtgcagttattttcatatagataaacatttctcttactgagaaatcattttcttctgggtactgttgagttcttaatttaatcagagaacattttatgtgtagtagcaaacggtactttcagtgagcttaaattttgatggggaaactgacagaataatttgcaaataaatatatgatatgaatttaaatagtgatgatttttggatctgtggctctactcaattatgtttctttcttgctaagagtttaagatattatcgaggttaccaaatagactatttatttagcacttttatatcagtgtttagtttccagaaaggtgaactgggtagccatgtttatattgtacaagtgaagtcacattgatattttattgcaatggaaacagtaagtggtttaaaaggaggaatggtgaagtgaaagaaattatcaacctgtttctttttatattattatctaaaactagtcatttttctgtttttctcttttgcattttttctcatttaagatcataagtgcctgttttaaaaagcagcccaatgagatgaccttgttaaaactcctgattatttctcagtatcgtcaattaaatgaaccccttattgtgtgcccacaatgtacaaggaattatatatacatatatatatattttttttttctttttttttcttttgagatggagtctagctctgtcgcccaggctagagggctagagttcagtggcgcagtctcggctcactgccagctctgcctcccaggttcatgtcattctcctgcctcagcctcccgagcagctgggactacaggcctggctaattttttgtattttttttttttttaaagcagagatggggtttcaccgtgttagccaggatggtctcgatctcctgacttcgtgatctgcctgcctaggcctcccaaagtgaggaattatattattattgtagttatgcaagttgaataaggtaatccttgccctcaagatattgaaactttaacaagggaaataagacatttgcacaagtaaataaaatacgataatactttaaatgtgatcattgtttttcagtattagtgttgatgcccattctacatcttcctctaaagaaaagaagacaatttgcaataaacctttggaaaggagttttgttgcgtctgtacttaggcaaatcgtgactaagaagttattctcctaatggccgcacatggtggctcatgcctgtaaccccagcactgagaggctgaggcgggtggatcacctgaggtcaagagtttgagaccagcctgagcaacatggtgaaactccatctctactaaagatacaaaattagctgggcatggtggcacatgcctgtaatcccagctacttgggagactgaggcaggagaatcgcttgaacctgggaggcacagattgcagtgagcagagatggcgccattgcactcctgcctgggcaacaagagccaaactccgtctcaaaaaaaaaaaaacaaaaagacaaatatataccagataaagtcctccaaaaaaagagccaggaaaagagaaaggagaccaggagggggttgcatgaagaaaatttagtattattatccagtattgccattgtttaacataatttgagttttaatcaaaatttacatttgcataatttaaaaaaccaaataaaatgtaaagagccctgccttatcattttcctaggaatttccgtgcttagagaaaacaccttcaactcctttagatgtttattctgggctttcatgtctgtaattctgggttttacatatatttcaccttgatttttaaaatgtagatattatctattgtcttcctcctatagaagatgaatgtttagctcctttcacctcctgcttagcaatccctttatttggttaaatcagtattcagagatttctttattatgactatataaatttactgtacagctatgccatataatatgatttgactatattttctttgctcaaaaaatttgtcttccttagtttttcaggactctctttggcatttctaggaaacaaaactctccaagggaactctgttcaagaaatctatcaggttttgttttttcccactagatatatgagtgggaagttcaggctggttgatctttagttctgttgcacagctatatccaagggctaacatttgctgctatactagggatttccttcccctgtctcctatgttggatcctccatttcctgaatcctacacgttctctcttcttggtttatttgtgtatttggtagagcacatgttctagtagcttctgaaaaagaatacaaggagggaagtaatttgaggagaaaattttgaatatctgaagtgtctttattgtctacaagtgtctaaacataaagaacgatttgaaattttactattatatgaaaacttttcattaaaaaaatttaaatggttgtaccattagctgttagcaatgttaatcagattctttcttcttttctacttttttttttttttttaacgacctggaagtttttaccatctctatatccctgggcactcagtggacccttttgcctatcagtgatggttcttatgttctgagaaaatctgcaaacacattcatagcaacatctagactcatgttcgaccaaacagttggacaccaagcctagccaagttgatgcataaaatcaacaatcacaagcaacctttcacataatgcctgtttacatacttgttgagtccagactttctttagtttaacttctaaaggaaaagcttactgcatcttcctgaagtgtaagagggacaacttcctggttggggaaggtatttagcacaccttatatctgacttcggaaatctctggggctttcaattccaaacctttctgtctagagttacacaacttgaataaattagcttattgtcgggctctccactgcaagagcttagctttttcttataggtatctataattgattgtcatttttctccttctctcttttttttttttttttttttgtttatttcatctctggggatttcaggagggaaacattattcaatctaccatgttttactgacaatgttcccctagtgtttttgaggttttaatcttttcagaccaaatctttgcagacatccttgagccctctcttttccccacaacctttgtctcatctaataaaaccaattctgctgattttaccttcaagtatatccagaatttgaccacttcttgccacccttacttacaccagccaggtccaagccaccttcctctgttcctggactattcaagtagcctcctactcccctttatctttcttccatcacttctcaacagacagccaaagtgatgctgttcaaacttgagtaacatcccatcactccaccttccatttgcttttcaccatagctaataagaaacaaagttgatattctttaataatcctcatggtctataatgtccatgaactctctgacctcatttccacaagtcttcagatcatttcttcctctccagccaacaagcctcattgctgtccttcacaactgttcaatgctctatctcaggcaggtataaaagtacctccatagcagtgctccctatatattttctgaattaatggataattatatttcaaaaatacctcagtggcattctcctgtttttaggtgtgagcctagcaaaggtctgtggtgtttttttcacaacacttacgaaaagcgttgtgttcaaccttgcaaatgaggaaaaataacagtgacctaagtatcatatattttttaacaaaacaagatatagtctgcacatattcatagcccacgaaaagagcaatgtgtgctttggggtggacatttttttattttttattttttattttttttgttttgcttcagaaattccactttaatgtttttttttttcctggttttatggtctcttacagtaaaacttgcattgaaaagagaaacccttatcctgaagtatctttatcataaacagatgtttgcagtagccagccctgcaatgtgcacagtaaaatgtgctgctacaatctgaagctttcatttacttatttaaacatgtctgagagacctagatcatataccacaggggcagacagcatgctggtgtgtgagcagtggggcatggagggagaaggatggggtaggaagggatgagtagcaagcttaaggacttctgcctccctttcatctgtgattgcaaatactgctgacccatagtagatgactgcacatagattcttgtcccactttcctaaaaaacattattaaggaaggtgcatgtaatgaaacctcatgtattattaacctaaccttactacgaatgtacaaggaataggtttaattcaagtaaaatttataggcaatttgttaaagcagcagtgcacattagaaggtacattagagacacattggttttaatatgccattcaataacttgaacagaggttaaaaatgctgcttaacctccattaagtattttaaaaatgctttaatttaaaattatttggagtgtgtgtacatatatgaatgtacacatatccacactaataaatataacactaaatatgttttcccagttccctttttcagtgctggatgaccttataatgttcagcagtaggcacttaatcagaggccaggccgaggaaggcagggaaggatgtcaacgcatcccgagccagtgacccacccttgtccttgagaactagaggcagagagtgcatattgaagactctgtagctttggaataaaacaaaggctaatttataatgaaaacagcttcctatgacatgttttgtactaatagggcagtgcctcctgcttccccctagtatttacttttggttttcttttacaattcataaaacaaagtatcttgtttcattaagtagcacatcatatttattaagtaatgagctcataaactagaattgtgtacaagaccctgccaatggaattggaatcagatgctgatgttccattaaaaatcaatgcatcaaagttgatatccaattatgccacatttcctagtgtttggtgagacaactttctaggttaacatgtttttcacagagagacctgaatctaaaagtaagaacctcttccttgataaatcatcaggaaggaatcttgtcacaggaaatacagaccacaatcttaggtacatctggaaaacaaaaaaaagtaaaagacactgataagaaaaatttctctgtcatagaaaacttgctaattgacaattacaaagatgataatagataatgtttactgagagtccgctgtgtgccaggctctgtgataaggttttgcctgcaaactttcatttaatatgcacaatatttctaagatggaggtgctgggattattctcattttaatctaattgggggaatgaaatctaattaagtagaagagccatttataagtccaggtccatctgactccagaatgtatactctgaaagagtggaactttttctttttctttcttttttttttttttttttttaagacggagtcttgctctgtcgcccaggctggagtgcagtggcacgatctcagctcactgcaagctaagagtggaactttttctaaataactaactcaatatttatcttacacattcacacaacaaatatttgagggtgagttagataaatactgtttatttcatccactttcaagcatacctcaactcatgattctggcttactgcttcacattctgggatacctcatttgttgttcaaaacccaagtagtaggcataaaatgaaaattaacagagtcctgggaaaccacagagttcaaataatgatgaggtaaattgaaggggtctagaaatggaattatctccgagaacttagttggagaaattctggagatggttggaatggcacaggagacaggctttagagcatgcatttgataaacactgaatgggaacagagaatataagttttgctgtggattttgaatatgcatacacatacatatattaattataatctccaagatgtaatcagagttgtcattatttgggttatttgttgttattggatttgattcttagagaatatgttaatgagggcctttcatgggtattcacataaatagaaaaattggattatttatgaaacagaaaattccaataatgttttcccttacatgagcatattattatgtcctttgtttaagagctaagatatagttttagggtgacattttctttctgcagctctgttccatctgttgctgtgacgagcactatattttaaatttattgtgtctgatccatatacactcctctctagactccctgataggacaggccactctgaccaaccactctcatgactcacagatttatgtttaccattttccttttcagtgttaaagggatcatctcatattttagaggatagaagatatttatccatctatccacccattcatccattcagctatctatccatttcattcatacatctgtttttcaataaacatctattgagtaaattaccagagactatgttggtgttaaggtatacaatcacaaatatactaagacattgtgatttagtaggggaaactgactcacatgtaaatgtatcacaatgtgatgagagccatattagaaatatacaatatagagaagtagtaaagtgaaggaaatgattaattcttgaaggatgaggggtcttaggaacttagagaaaatgatttctgaactgacttttaaaaggaaataggaatcagcaagctgctcaagaagggagtagcagcccagaaaaaaaaaataacagcagaacatttaaagcatacctaatttaattgaaaaacccttaaaaattgttttaaaaaagagaaattataccttgggatgaataatattaatatttatgtattcacttgatcaagtctagaagtaattttagcgtgattttatataaaactaccaaatggaggaaaattattattgttttaatttgaaaactaccatcatcaactatactgaaatatagtttacaaacaatacaacaatattgaaaatattgattcataaagccattaccaagatagtcttttgttgcatggatataggtgagccacccatccctccccaggctcttgtgtaactattatgtccattttctgccttaaggtgagagtagtttcttctaaatgtcttacaattagtgcttagccccagcattgccctcctttcttgaataaagcctagaggttacacttcttttctttctccctctcaagaccttggcaaagcctagttgttcatggtcctcaggagagacattgctgggaaatgggctcttcttttatgcccaggacaagtactgtgctatgcaaatagccgctgcaggagataataccagctgccttgctaataactttgaactctgtagattcttctcctaggcaaagccacactattttacaatatgggtgactctttgttttagctggatgatacatttttttccacttgagatttgtcatgtctaaaaccaagggtcagctaaataatatgggaaaataataaactagcgagctgatttggaccatgtatatgtgaactctcagcactacgtaatgcaaggtaataatgttgtcctaatgaccatgcttaagaatgtggtacaaaatcattcatggaatgaaatctcaatatgatcagttacaatgctacagatatataaagatttggaacatgaagaagagctaacaaaggggtatcagaaatgcattacattaaagtaaattgaggtcagttataattaagccacattcaggagttgatgtttaagtggaagggaagggaaaagattgttttctatagttggaagtcataaaaggaggtaatggtctagaattaggcacattcaggtaaggcaagaggtaatctttaagcaggaagttacctgagtcatcctaattagaactgcttaaaaataggacagctaaaatactggtgggattaacctttataatcaggctcctgagaggaggaggggaattaaccccaaggcaaattcccatgcagtcttttcctggaagccctaccttcactttcagtctccctaggtgctttagcatctttttagttcttctctgcttgtacttctgatttttctgtgacattctttattccccaaaacttggactacccaacttctgcaccaaaatgctatcccctacttgtacttacaggtttatctaatacatcatttcttctaaaaatcacccttaatttttccaaattctctgtggcttggagctattgcagtaagtctaaattaattctacttgtaagtatctgtgctaatgggtaatttatccaaattggagagctgttagcacattcatgatgccatcatcatggatttaagggcctagataccttcacaggaagaaaaatacaaagaatcacaaccacagtggccttgaatttaaatggaagccttctgaatttgactttgatcatgtgatgaatcaggtacaagaatatatactaattgtcatggccatgctctatttctggatatgtatatataagggaaattgctgtcaggtggtacaaataaacaaatagcgtaacctggctgtaaattatgataaaaatgatagtattagttgatttccgccaactgaatggcacatattttgagctctttcttttcctctcattgagcacaatgttttctattttgctgcccttgaaactttgtaagacagaatgtataggatctaggggaaggaaaaaaacccaattgttggtaactataagaaaatggcttgttttcaacaagagcctggaatgagttttagagtatcctaattactttttgctgttccctatataatagataagagaatagattcactttttgctcatgctctccttctttcaatatcattgctattttatgaactttaaattagtgtcatgacaattgtacaattcatttttatttgctgtaactgtattcattagaatccttctgtgatccttctaccccattgtttcagtaaaattctttgcagcattttgcacgggcttgtgtgtgtacccatgggtctgtgcatgtgtgtatatgtatatgtacacatacatgaacacacacatcacacaacactaagaaccatttctccctcatatgcctgctccacattcaactgcctgataactttctaattctataacagttaacttccatctcctgggtctgaagagattttaagtaatttgaataaacttttgaatcatatttgtatttctttcctttttccataagaaaaaaaatatgagttttagaggtaagctaaagtctctaaattctgcaggctttttttgtgtgtgtactacttgcagggctcacagcctgtttaataattgaactcatttttatttgttcatcgaatgtgtttggaatgcctactatgtgccaagcagtgtactggctgctagggagacaatgatgaatgaagcagatgggttttctgcccttatggaagttagattttggtggaaatgagattgattataattttcatgaacacttaggaaacaaacaggatgctatgcatttgtaacaggtatacctagcctggcctagggaaagttgcctgaggaagtcacgagacctgacttacatgagtgaactgagcaacagagataggtcaaaatcatcccagcagacagaacggcccatgaaaaggcctttaggtctcaagaagaggaacaaatatgactgcaatggactgagcggggggatgagccatgagctaaagctagagacgtagctgggacctgactgtaggattgaaagctgagtgagagatttggatttatttcctaaagggaataggaagtcatcagttagtttcaaatagagaagtgaaatgtccaaactgcactttggaaaaagactgctacgaagaatagattggaacaggacaagagggatgcaattagaagagatggcctccgggactgggtggtctgggtgtaaacctgggttttgctatccattaactctaccattttaggaaagtgtgttaaccttctcaatcttctgttttccaattgacagaatagatgtaataataattcatgcattatttgcatttctatgacaactaaatgagatgctcaagataaagcccctacagtagcatctagtttgaagtattagttataaaaaaagtggttggtgactttatctgggaggtcgtagcggggatgaagagtggaaggtttaaaattgttaggaggcaacatccataggacttggtaattagcaaaatatagggggtcagagaagtggaggatgcaagcttttgttttagtaaaatacagaattagtttaatttgaatttcagataactttttttagtctgagcaaatgctgcatgggctgcacctttgctaaaaaatttcattatttgttagaaattcaaatgtaactggcttcctatattttataagtctgccctaccaaaggtacctcagtgttctaggcaaagcaactgaatgactggtaatatctgttggaatggagctgattagaggaggtcaagttttttgtagaaatattgaaatattgcatggtagattttaaatacattgaattgtaggacctgggaggcacccaagtccaatgtagataatttactcagtttttctttggtcataattgacacactgaaggacagatataaccacatttgtattgggaattagtgccttggtagagtattctgtttttctgtgtaatcaattattatgctttaaataaaagagtggataaaaagtatatataaaacttttaatttctttatttctaggtttttatatttctccaggcaatgccactggctgcctgccatgctcatgccatacaactggtgcagttaatcacatctgtaatagcctgactggtcagtgtgtttgccaagatgcttccattgctgggcaacgttgtgaccaatgcaaagaccattactttggatttgatcctcagactggaaggtacatctttataagctttaataatttaactctttctttagcaacagttaactttttttggcagttgcaaagcaataacttctgtaaaaagtattttttttgcccggcttggtggctcacacctgtaatcccagcactttgagagaccaaggcaggcggatcacgaggtccgaggtcaagaggtcgatatcatcctggccaacacggtgaaaccccgtctttactaaaactacaaaaattagctgggcaaggtggcatgcacctgtagtcccaactactcagaagtctgaggcagaagaatcgcttgaaccgggaggggtaggttgcagtgagccgagatcgcgccactgtactccagcctgggagacagggcaagactctgtctcaaaaaaaaaaaagtgtttttttgttattgatatgttttttgttccgtgacatccacatttacttaatgtatgctaatctttgaatatttcctagagtgggttgctatatattgatagatgtggcccatcctagcatctgggaatgttgaatgagataaaatatattttctctcaaaaagctgagagtctggatgtggagaaagacaggaaaagacatatctgaagaagaaaatacacatactcatactttctctctctctctctctctctctctgtctctctgtgtatatatattatatatatatattatatatataatatatatatatatatgggatatatgtatgtgctttgttcttcattgcccttgaatttattgcatatttattagttcattgcatctatttatattttccttgcgtttctaatttagctttaaagactggcagatgagaaacatagctttgtattctgtgatatgatttttttcagtatgtaaagtatattatgaaagtaaatcatttttcaaagttacactctctttaatattctacttcttattctctgggtatctgtggccatttgccttcactcatttgtgtttattgctgtatttttgaagatgtgctataatgccaattctgtgtctgtgtgtgtgtgtgtgtgtgagagagagagagagagagagagtgagattatgagcttgtctaaagttcagactaaatctatgaattctttgaagctcctatccctgagaagctagtagtgtgtgctgaactcagaaagcatgtaataaaatgagtcaaatctgtctctcaatatgtgtatatttataaatctaattgctaattatttcagggtttgtgattatctgggctcttttaaactcattgcccccctgctgcctgccttttggctgttccactcctcattaacacctccattagagggtggacaggtgacagggtaattactgaaaaagaacttaaactagttcattttgactttcttttaaaatttgatgtgatttttaaaaactacaaaaatcatttaaaattttattaaaataatttttgttttcttgacatacatgcatatattttaatctgtgacgctctacttctatcaccgtagaaatgttaccttgatggtctgagaccattgtgactcttttctacagatgttattataaatcatctaaatgagtatacaaagcgcatggtacagtaaatagtaaataaaaagcactgtcaggattttgatagtaaaataggagccagttactgcacatactagctcctagatgtaatttttttgaaataatattctacagattccccagttggaactcttgggctggtttgtttcactcctggccacctctgtctttttcatagttctgaccacatttaccaggagaaaaatatcttccccaacccactgtcctccttgcaacactcattcccatcagtgccattttgtgacattcaattacccatttttgttctactcatcccctttgtcagtcttcccagggttatcagcaaaacgcctgctcagtgacctggggatgtctgattgtctcagctttttcacttaactttttttctttaagtgagatctgattcccttcattacactgcttcctctaccctacaatgttcttaaattcgtggctgagccttttaccccattctgttcctctcccattatctacccatctcactctcactccccaccttactttagtccaggaacaagaattgcttaataagtactgttccatcacctgtcactctgcagtaggcctgactagcactggagctagattccctgggttagaaggtggatttaaatgtttacataaattgataaggaataggaaggaccaaagaagtgggtataagctacatttttagaagataccgaagttacaataaagaaagaattcagtctaggcactatggctaactcatgtaatcccagcactttgggaggctaaggtgaccagatcccttgagtccaggagtttaagaccagcctgggcaacatggcaaaaccccatctctgtaaaaaataaaaagttagccaggtgtagtggctcttgcctgtagtcccagctacttgggaggctgatgtgggaggactgcttgagactggaaggtcgaggctgcagtgagtcaagattgtgccactgcactccagcctgggcaacagagcgagaccctgtctcagaaaaaaaaaagcaaaaaagagagagagaaagcagacttcagattcgcaaaaagaatgaggggcaggttggagtctagaaaatagagctaaagtatgagaagctgagtagatttctaaaaatatgaatgattcagattaagtgtggggttttttttttggacagagtctcacactctgtcgcctaggctggagtgcagtggcgtgatctcggctcacttcaacctctgcctcccaggttcaaaagattctcctgcctcagcctcctgagtagctgggattacaggtgcatgccaccatgcctggctaatttttttgtatttttagtggagacagggtttcaccatgttggtcaggctggtcttagactcctgaactcgtgatccgcccacctcggcctcccaaagtgctgggattacaggcttgagccgagtgtgtgttttaaacaaaaagatccacaagttttatataaatgagtttggatatctttacatattagttggctcctgttatattgatgggggtggtgagattacctttttaaaattacaaattgtccttggaaatggtcgcacttttcttccatccctgtattagtccgttttcatgctgctgataaagacatacctgagactgggcaatttacaaaagaaagaagtttacgggacttacaattccacatggcttgggagacctcacaattgcagtggaaggtgaaagacacgtctcacatggtggcagagagaagaaagcttgtgcagggaaactcccctttttaaaaccatcagatatcgtgagacttatttactctcatgagaacagcaggggaaagaccctaccccataattcaatcacctctcactgtgttactcccacaacacatgggaattgtgggagttacaattcaagatgagatttgggtggggacacagccaaaccatatcaatcccctttgttcttatctttccagttccaggttttccttttcagagggattctatttttctcccttttctaactcctgccattattttaaactactttgacatgtactgatgcagttctttggcctcttcattcattccccactccagcaacccatttccatggctacaccctggattttgtgatcacttataatttctctatttctcaaatcttcctaatcccatgaatgctattctatggatatatcacatctttccaattccaattcaccctggaagcctcacataacctgctccttaacttctcttaatctttatcccattatccctccttaatcctcttttgatcaaccccatccctaacttcactgtcttctacttctagcctgaggcaaaacctttttaattatgacccttttgagtacctgattgtgggctcccttctgctgtactgtggggtcagctccagagacgatcaccctacacctgccctgatctgtgaggacgtggggaaagatcatgtgcctatgctgatctgaagcactaccatgtatgtacttcttatcaatttactttctttccccctttaaactcctaccagtctcctcagttttaattccatgctcttgcccttgcagataatctggccctctgctcatagacaaaataaagccagatatatgtatctccagattatcttttctccacctccagcttgtctacattgtcacacatttttaattttttatctagtcttagaagaaaatcctgtgtatttttgcctaaaaataacctgttcccagtccttgatatgatcccttcctgttttcctactcttgttcctccattccatgatctttgctccatcaaatcctccctttattttaactcaaacatctctctataggtaatatcataactgcctacaaaaatgctattcattctacaaactccttcctttgattctgccctgctttatgagccctgaaagttattgtctaatctctcactcttcattcacttactaacatttaaaaagagcactatgattcaagaaaacatgatttaaaaaataaaagatcagattttttttcttcttcattttgtttctttctcattcattctttattcaccatgtgtggtacatacatgttagcagaacatacaagttagcagaacttgcaacatgcagacattcaagaactagttatgtgactattaaattctcatccaaatcaaagacaaggtctataaagagatataataaacaaaaatgggttaaggaaaagacagaatgagggaacaggtttcactggtgggaaaaagggaggggtcagtggtgctttccacttgagtccagtgagaaggtcttatttgatcccttgaagggtgacatgtgtctcctgcagttggagagaccagtgcattgatatctatcttagacctggcaaatctaactgagaagagacagtctacccaggtttggataggtaagctagaagacagtgccctgcatatcttagactcccagagttcatcatgacaaggaagactacgtatttctcatgaccggatgaagaccacaaggaagaaagacagggtaaggttgtcttagtctgtgctcaaagtaccacttagaagataaaggggcctgtgtagaataaaggacaagattactgtggactacaggttaataagcaaccagtcgaaaagaaaatgcatctgactgcactaaaacaaaaggtgagagatacctaatggtgagaaagatcaatgaagaagtcaggaatgtaccactgtcagtgataagtcagttttatgtatatgcaggaccagagacaatagactgctttgggtggttctagtccaagtgagtttctacccttcctgcagcctctacgtgagggaggaggctaaccaagctaccttctctgattatagacttgctgcctttatcatgtcctagcttgatgaaaggaagagaagtatgttcttgaaaatgtctgttctttaaataaagattggaatgttgactaatatacaggattagactttctattttctgaattgaatttgtattttgcaatgtaaagtaactgtaggacattctattgcctgagaaagaccagaaaagccaagtgactaactcattttatatccacatggaacatgggggaattagctccatattatatgtttaaagggtcagtgaaagacaaaaataaaactgatttatgattgcttctcatgacttatggtttctcaatgtgctggtcatttcattgttcccatttatttcttaaaattacctcttcctttggtttccaagattctacttctcttatttgttttctaactctttttttggctactcctttttaatatgtcctttcaatttccacaactgtgtccctgatttcaaccactacatacatgttaatggctttcaaacacatgatcacccattcagatgcctgccacgcactctaggcctgtagccagctgtctctctgagttttacgcttgcaagtccctcgtgcatttcatttttaatatagtcagcacagaactaaccattacttcctcatctccacccaaataaaaataagtcttatgccatctcatgctatcatcatcttggtgaaaaagacgtaaaacttcaaataattattcaagtccaaacttcccaagtttgagtggggcttagattcttctcaggtttggcagaattggctctgttgttgagtagaatgagtctacaggctactgctggaaagtgctatggaaagcaagagctactgtatataatgcagcttctctaaaaagaatagaaagaataaagcttcccatggccatatgggacccaaggagatcagcaggatttgtctcttactaaatcagtcgtgtggaatgctggtaacttgacttgaccctcctatcccactgatgaattcagctgtctcttttcacttcaacattgataatcattacacaggaaatcctgtagcacagaagggcatggagaaggatattttaaaatgtgacaatgagaattgcttgagtttggacttttgttcaacattgaaaagagataaaagtgggttctttttaatgtttttccattcctcttttgaatgataccgttcttgaatctttttttgacttctggttgttattgtatatacaccaacattggctatattgaaaatgtgtaacaattgactaagatatatgggattccatcaagtataagaaatttttgttttttaaaggaaaaaattcacatgtaatgtaaatatatacagatatgcagtataggaaaacagctatgtcctaatgttaaaacaatgtttttgaaaacaaagtagattcaaaatcatttgaatctactttgaaatctaggcactgtggtaggttattacaaatagaaatgtttacatttataaaaattacattccaattataacaaatggaaattaaaacattaattttcaaaatatacagtagattataagtaacttattattatgaaaggggaagatacaagtatcatattatttcttcatcaacttggaaaataacctcacttccttatctgcctggttcacatattccttaccttcttcatgctctatttgttggatatagcaaggtttgctatattgttttctcttggtttatttgctacacagttttttgtattcccaagggcaaaataaataaaataaaatagacctcggccctaaactacacaaccaacaacaaaaatccaggcaacacaacaatgactttttgtgaccaagctggaaaatcatttgcctgtttccatctaagtggtttattcttcaaaagttactgaccagaaaaagggggcatgtattttaaaaagctgatcctagtgcaaacattactccatttacctctgacacataaagcaaacatgatttaatcagtatcgaaaacaatgaagcaaaaaaaatctgcccactgaaaaatcaataatgcaaaaaagtatatagtgtttgtctaacccaaaaacaatgagacaaaaatgggccatatttaattcatctcagttggtagtggagacccatatttgacaccctgcacttactggcactgtcctcaagttgacctgtgactatgactactctcccccatagcccccaggactgctccagttcatctggtaccccacagttttcttacataacaaccacacatcacaacccccaaaagtttcttccctaatgatataccctctctatattctatgttaccttgttttaagccttaaggagttagtggtatcactatttgtcccatttactagctgacacacactgaagttgtccatagagggtaggacaccaaggctggttagggagaataaaggctcagacttctggagcataaaatacagggaagttcttctatgcccagattatttttggttttactgcaaatgttctacatttcagcactaggttatagatttggtccagtaatcttttcacaggcctttatccgattgatctcaattggtcttttctctgagaaccaggtcaatgacttcagatgaaagcagataacttccttgtcaactgatttccttttatggtgtgataatggaaaaattagggagtgtgcctcatagattccctctcctcagtgactctttgtcagacagctggctgtcatctggggtgacagggtaaatgggccacaagcctgtcatcatctggcagccaaggcagggctttctcacaaggcagtggcagatttccaagaaagaaagcagaagcatgcaaagacacttgaggcccgaaccgtcaggatgttacttttaccttattctactggccaaagcaaggcacgaggcttaaccatgtttggaagtggtggggaataaacagactctccttttgatgagtagaactaattatacagttagctgcaaaggacctgcacagagggaaaggtgaagagttgtgatttttgcaatctcctatggctgccaaactatatattctctcttagtatagatgatatatgatctgataagaagtatcagtttttatatattagtagcatttattcaacgtgatgtaataggaataacatgcaactggacatcaggatatccaggtttcagttttgtcttttccactagaccagatacagtagcttcctattattggtggaataaattatctcaaactcagtggcttaaaacaacatgaatttttattatcttatagttctggaaatcagaggctctaaatgagtttcactaggctaaaatcaggcctgtgtttcttatggagattctaggaaaaaaaaaaacatttccttgattttcccagcttttagaggcaacctacaatctttttttttttttttttttctgagatggagttttgctcttgttgcccaggctggagtgcaatggtgcaatctcggctcaccacaacctccgcctcctgggttcaaatgattctcctgcctcagcctcccgagtagctgtgattacaagcatgcagcaccacccccagctaattttgtatttttaatagagacagggtttctccatgttggtcaggctggtttcaaactcccaacctcaggtgatctgcccgccttggcctcccaaagtgctgggattacaggcgtgagccaccgcacccatcgtacattctttagctcatggctccttccttcattttcaaagccagcagagcagtgtttccttggacctctgcttatgtccttacatgttttctctctgactcttaccctcctgccttcctttataaggaccgtagattacattgggcattcttggataatccaggataatctccccatctcaaaatccttaaccacatctgcaaaattccttttaccaagtaaggtaacattcacaagtttggaggattagaacttggatattgttggcgtgggcataatatgacctgctctaccagagttcagcaatctatagcctgggggtcagccacatgtttatgtaaatagagttttattagagcacaccaatgttaattctttacatattttctgtggttgctttcctgctacagcagcagagttgagttacaatagagctcatatggcctgcaaagcctaaaatatttactatctcatcctttatagataaagattgctgaccttgtaactagatttactgtcaccttggacaaattagtctcactaagcataatagaatcataactttatagactgggaaagaaccttaaaagtaattttggttaaactctaccctatacatttctctgcgtaaatcaccttttcagaaaaactggtgaatggccattcagcttctgctccaaaacatggaactaaaaggagctcactgtctcatgaagtagctcatgtttatttcaaacagctgtaattcttcaacaaatagaaatatattatttatattgaccaaaaagttgcagtcttttgactttcttgcctagtcttatttatgccttctgagaccatagagaataagtgaaatctctcttctatctgtgagcactttaaaaatttgattctgctatcatatctgaaagttatttagttatttgcataaatatgtggagtgtcaacaaaggagaaagagacagtgttctcagatcagaaccttgctgagcaagctgcctggacttagctgtcactattgcatggatgcaagggagtcactgcccctggtccagcttttatgagtttctctatttgtgcctgggaaattcaccaaagagggtggggttgcacactgttaacgtctccctttcagatgaggcactcgtatttccttgttcaataagccatgtaaatatggctttcagttcacacagcgtggatgcccaagcctcaaatccctctcctataattctgattccatctccaagagaattcagatgctgttagtagtctgtaactaaagcgaaactaagaagctcaatgaaaccacagctcctctgttaatcggggaaaaccaaactcctctagagggcactgtagcactcaccgaattctgtgaactgagaacactggtttaagagaatctgaacagataccagctcttaaagaaaactgtccattccctgggagtgaggttagccagggggacagagttaagccaataaaaaggggctcaaaagagctaacttgttactagagctacaaaccatgtttggattaatctccggtgtcctatcctaagtctaaagcttccctggtgctttattcactattaattcctgtatccgacaatatttactgaatccttactgtgtgctagcctttgtgttagggactgatggaaaaaactaagacaaaaacaaacaaaaaaactctgccgaatttctccaatttgccttgaagtctcattctcttttgtttattaataatccttatctaaaatcccttagcaattggagatctctttctccttcgttctttatgttgaatgatgtcttcatcatccccattagcaagttagaagaccgggagtaactttatacctatcctcccttctcttttcaattcggcctcccattctaccaattttacttaacatttctcaggtctatcctactcatttccattgctccttgccactgccccaaggtagcattatcttacttctgctcacctttccaggtttatctatcaccatttctcattatgaatttacatccaggagtactgaggtgcttgcaatttcataccctcttctgctttttcttttttttctctatttttgcccctccccgacttccctggcttatttctactcatcttttaacgttcagcccaagcatctcctccaagacttctacttaaaattacccttcccatcccttcttctgctaccagactagttaagttgccccttttctggacctttagagtctggatacatctttattaatgctgtttccgttttttcttgcatacgagattgtgagctccttgaggaccggggcaattctataagattcatctctacatccttgatgtttattccagtcctggaacatagctggccctcaatgaatgttatttatgtcaatcaatatttaaatcaatttgatagtacccatgagctgaggccccatagagaggaggggtgtacaaagagaaatgtcaataaattgacctatatatcttgggatatatctctgggcctcctacagcagttctccctcagatgatgaattttctgacaatgatgtgcattactgaaacatattcctttcattaatagttaggtttcaacagtaataattaggataaccatttctctcactgtttccacaactggaagaaattcctaagaaaggaaggtatatgaaatttgtgatgtaggagacagaggccaacttctttcccattgtaaccagcaaatactgagttatgtaagggtccaaagagaactatcatagcaaagtgctggcagagattagtgatgctttactcctgttttgtttaccataatgaactggtcaataaacatcacaaattgtttatctatataaatcttgacagattactctttatgaaatccatttagcaagcgaggttttcccataaggatgaaaaatgaagattttaaacagattgcgggagaagctctggctgtaccaagagagtcagtgtaataaaggtttctttatattaatattacaaaaaccatttatcctggcaaaatcaatattgcaattcatcttagtttggtgtttctctttctaagcttaaaatgtcttttcctttattatgtataattttgttttaataaatgtgaaatatatttcatttaggaggtactcttgaggagggataacttataaaatgacatcaaatttgtagcttatttgctaaagagtcttggaagtgtttaaaattatatttgagtggctgagaaatctaaaggaatcattttgcttaatccttaattacaaaattatccctgtgtcctttggggtaaaaacaaactacaattttcagaaaagtcttcgcttgtgaacttcatttaggaaaaattctctcttactgaagtcaagtgattataacaagtcagataagttgactataacaatggcttggataagagactataaaatcaagaatagacacatttaattgctcaaaacattgcgtgctttggctggaagaaaatagaactacatcaaggaacggaattatgttatacattggaagctattactctaaatgtactgtatgtaaaataagtgtgattgtctcatgagtgaatggtaataaaaactgaaatactcaagagacacttattcatgagtggtgcagttacacatacatatatacacacacacacacacacacatacattgagagaagcttttctcttattgtttatgctcactaatattatattaaaagcctataaacaatagactctacataatagcctataaagaaattaagagcaaatcaagtatttttgcatctataattccattttaattataatacataattttcttcagctctaaaacttaacctaaacaaaacatctatttgaaatggaattctgatgtaatgtgtatagataaaagacctaatatagttgtttgaagggggaaaatgtccttttatcatgaccataaaaacggcaaactacagtacagtggttttcaagaaaaactgtactttatttattcccaaggggatattagtccataaaacaaatttgcagcttatttggcagtcttagcttttatcagcctttttaagggtgttgaatgattacccaagagatcacactgtaaaaatggcagtggggaaaagtaactccatccgttcagcatctttattagaatatataggtgaatccatttgatgttgttttaaacgtaccacaaggagagtaccttttaaatggtgagtggtcttcttacatgtgctgttttgcttctctaatacctcatggcaccaacgttgcttatcctaattagtgccattggcataggctacatgtttgaataattcactgtgaagaaacaagttttagtttctatcatggcaaaatgccactactggtatttttacaagcaactttgggtccaagaaatttaagttgcactaaagttatcttactatatttatgtcattagcatcttttcataaatcagaataatgctgtattctccaaccattatggataactaagtttagttcataaaacagaaaatgaaatataacccatattaaggcatcaaaaatatttgaacctgtctttctcaagcaattttcttagtgaaatttagtcttcatcgaactaactatagaattttaagatttttagggagagcaatgatttacccctgattttctatttcgcaattggagagtcacttgaaaagataattttatgggtacctaatctaaatgtttagctgacaggaacactgcttttgtaaaagcaaaatttacagcattcttaattgaacaactggattcaaactaatccataagatatattgtgggatgtaaaaaagcaatataatatctttttttgctattaattagtttataaagagaaagctttatacgggttttaccaggaacagtagttttataaagatcttttctattttcctttattttatgttgattctttgtttgtttagctcaagcattcttttcaatatattggctaaaacaagccgtcttactctacaatgctattggtaggtgtaacttatactatgaattattaatcaaaacactattctctttgatggtttatttgccttgttttcagatgtcagccttgtaattgtcatctctcaggagccttgaatgaaacctgtcacttggtcacaggccagtgtttctgtaaacaatttgtcactggctcaaagtgtgatgcttgtgttcccagtgcaagccacttggatgtcaacaatctattgggttgcagcaaaagtaagtgaactctggttcagtgctggtgtgtgaagcagcatcatacaggggactgcatctcattgttttctttctccatttagaacccatcagaaaggcttagtacaatgtgaagaacgtaggtaagagatggaaaaaaatacactgaatgaaatatgtctgcttttccttgattagacaattggaaatggtaatataattatgttcatggtgggaaatttacaatagttttttggagtgaaatcaacaatgaggtgattaaagtcctaggttttcccagaccaagggtcttcccaggacacaagacttttaatggtaaaatcaggactatattggttaaaccaaaacagttggtcaccgacacaaagacatttccaggtaagttatttttttttgacaaataaagggtgaattcttgtttattatatgtttgatattcttccatcccccaaattttgtgggcagtattataccattagttgtttatcgatattgtaataattagtatcattcgtcacgcatattattcatcccataattcatgtttctttctactttaagtttcactcatttaaatatctctcacatttatatttttaattccttaaagcctaagattacatgtaagtatcttttgacttttcaacatcgcttttcagtaccttgaattgacctcacaaggtcacctgcagttctacaatttcataacatattgaccgttttcctatatttacttcaagatcatacatccttaccctttccagaatccctaagaaatgcctgctgggaacatgtggtaggagccctctacaacatattgtgctatgcatattctccttggggtgtcctgagactgtcatgagtcacaatgataggaaacgccacaagtcatgacagatcatcacaaaccagcatgcctggaactctgctatctacatttaaggggggagggagaaagataagtaatgggatattggactccacaacaactgtactagattttgaggtaatggaaagcaggatatagctagtgattaagaagacgtattcatattttgtacctgtgtagtttctcttcagcatcccgcatttcatcagtccctctggatttcagtataagtaaaactgtaggtatttatgcttcttttgggaaagaactgtcataattcctttcatgtataaatacagtctaaacataaatctggacttcattggccacttaattactatgtgtcatttattgattagcaatacaattgattgctttgtatgcaacaaaaattctagcatattccttttggatatgagttatggatcgtcatttataatggaattacaatacctaatcttagtgatttctgattggttctgccactaattttgtgacaatattggcacctgctctactttttgctacctattccttcttgcatttgagacatagtctgggaattatctctcaggcaaaactggatagtcatgtcactggaaagctagcctacaactcttagtagtggtagacatttaattttatgttttattaactggacattctttccaagtgtttctgatttgttagaatttttaaaaactctcacattcctaatgattcttccctggacatattccttttggttttttatctctttaaaattatgatatatcatactgagcacagttcttcaactcttgtggttgttgctgcttctgttttaggtttttatttaacaaaatttttgaaacactgtgtaaagttggaagctcagcatcagcagaggcaatttattagaaacaaatgagacaactttcctgccttcagaggaggtcaaaacatagctagagtgatggacactgataataggaggggagcagaaaaatgtaaatggtgggatgaggatgaagggtcccagccttctctcctgttccagcttgattttcacatggtacttgtgtttgatcctagcagaagccagccagaacaattggcttcacaaagatatgatgaaattgaaaggaatgtagtgctatctattgctgacacagtgaactacctctgactagtatttgtctctgtatccaacagatgtcaagaaatattttcatttaaaattaaaatttctcatggtaccccaccccctacacagtttgggaactgcaggattataaccctcattatatcttctaggggccactagcaataatttagtaatatcatctgtgatttttatttttggtgggctgtcagggtgggaatcctaggatgtaatttccaaaatgcaagaggattgaatgaaaataaagtagttagaccttttcttatagtaaatttcccttttgggtgattcacttctttcctttaaatattggtatcatgctttcaaaatgatagtcattcttcttgataggaagcaaaacaagaattaacataaattaaatagtcctattttctgtatgctttcctagcgaatgatattctagttagttcaaccatctatgaacctaactaaaattatacacatacacacacacacgtatacaattagccacttattgtttgatagtgtttgtcttcttgacactattctcattgttatttattcatctttatatccacattttttctttatctctccttgccagagagcctcttctagctctccttttattaacagctttattaaagtataatttacatattatatatttaacaattttaagtatatggtttgatggattttagtaaatttagacttgtgcaatcattactataatccaattgtagaacacttctgtcatttcaaaaagttcctttgtgcccatttccagtcaatcatgactcccacctctagccccaaacaactagttatagggtctttgatgagataattttgcctttcccatgagttttatataaatgaaattatacaacatttagactttttgcaatgtataggcttttgtatctagcttcatcttaacaaaatgtttttgaggttcagtcatattgttgcatgtctcagtagattcttttaattgctgagtagtattttatggatacactatattttgtttatccattgatcagttgacatttagattgttttcagcattggtctactatgaataatgcatccatgaacatacagttacaagtctctgtgtggacatgcatctttatatctctttatatcctgagaataaaaaggctggtttgtataccaaatatatttttaatgttttaggaaactgccaaattattttccaacatggctgtattattttacatttacattagcaacttataagagatccagttactctatggtctcagcaacatttggcattgactctatttcattatagccattcagtgagtgtgtagtagtatcttgttgtgattttagtttgcatttttcctgctgactaatgttgaacaacttttcatgtgtattgtcattcatgtgatttttggcaaagtatctttgaaatattttgcccgtgttttagttgttagtcctcttactgagttaaagaattccttattaatttgggataaaacttgcaaatagtcctctcattctgtggatttgtttttcattttttttattggtatactttaaaaagcaaaagcttttacttttcatgaagtcaatttaccaagcttttcctttatgggtcatgtttttgtgtcctatctaagaaattttggattgactcaatgtgaaaaaaaaaaattctccatttttatcttacagttttatacttaaacatttacatttagatccatgaaataatttgaattagttttgtacatggtatgagttaagcatctaagttctttatttcatttttattttttgacacataggtatccaaatgttccattaacatttgttgaaattgccatcctttccccattgaattacccaagcatctatgcaaaaatgcagttgaccccatagctaacatcatattcaataatgaaagactgagatctaagatcagacataatacagaaatgcccacatattagccagagcaggtaatcaagaaaaagtaagtaaaagtctcccaaattagaaagttgattttctttacttgtagatgatatgattctatatgtggaaaatccaaacaaattcacaagaaagctactagagctagtaaacaaattcagcaatgttctatgttacaagatcaacacacaaaattagttgtgtttctataagccagcaatgaataatttgaaaaagaaattaataaagcaatttcacttataatgcatcaaaaatttaaccaaggagatgaagacttgtacattatctgttttctgtgtttccaggaaacctatagtataattgcgcaatgttatttctatgcactgttccttttatgcttagccatgtgctctccagtgtctcatgagtttcatgcaggatctgtgtgtgatcacttttctattaggatgctaagatagaagtaattttcccattagtatatattatctgtggtaataaatatattacttattgccaaataagccatttataattcttgggatgtaagaatcaaggatgccttccagcacactggagggtagaggaaataaaggtgatatttattgaacaattactttatacacatatacacacacacacacccctacatacatatgtgcatgcacacacacacacacacacacaaacacacacacaccttatcttcaaaataaccctgacggggagacattatcattctcttaatataaatgagaaaaggttcagagagtccaatcaatatttgactataatcatacaactaccaaagttccaaagctggagattcaagctggtggttcccaaagagatggatctagtcacaatattatactctcatcccataaaagagagtctggcatatgcaaagaccattcttggcaattttgatgagtgaatatgtgaacattttttaggaattctacttcaagcacataaaggttcaagttctctcatgctcaagatttaataatattattctcaaaagtgttggtaagtcatctaaaccttctggcttatgaaaatttcaacttaaataccaaagaggtactatttatttatgctgtggagtcagacaagattgtggttgacatggtcatagcaagtaatcagcttaaatgtttggaaagagcctctgtgtgtgaagaacttttgttgccaaggatattttcatgtaatgcaaatcattttctacaccctttgacatgggagtgaaacatctatctctctttcattttcattcatccccaaagcattttgctgccttagaaaatcatctgaaggtcagttttgattgctctaactctgaaatctgttgtgttcctgatagcatgcagagttttagatgaaatcactaatattcactaaaaaatgttaaattaccatgaattgcaaggttctttgagagtgctgtaaatgaggcagttgatgatatttgtggctccaccaagaacaacaggatttaaaaccctaaattaaaatccactgaaagggtcaaatgcattttcagtgttcaaccgatcaaagtgaccatatcaaatatggaaaattcatgaattcaaaaatgtaaggtgttattcggaaataattcttttctcatgtgtcattatgagattgttgctactcttttcctatgtctaaataggcatatagactgttggaatgttaatagaacaatgcaaattccaaagaagaaaaagacaaaaggagggcaatgagcatgtatctagtttgaatattttaaaacatatgatgtaaatattatctgccttaggatcagactttgtctttaggaagcctattcatagtacatggaattttatatattttacattcagtgctgtgcagaataaaacaacattttccccctctgttctcacaccaccatcaacatagttgaacaagcaattctgcagcattaatatcctacaatccagttcaactcttgcgctatatacctggaagtagtggcagattccacgggtgaggggtcagtccccaaggctgcccccaacttctaacaccaatcacaagctccaggttattttgcctgtgcttgtaacccactggctataaattggggctcctatgactccctccttgggttcaattactttggcagctcagctcaaaataaggaagcacttatttttactgatttatgatacaggatattgcaaagatacagatgaagcaatgcataggacaagatacgtggaaaggggagctgagcttccatgtcctccctaggtgtcacaccctccaggaacttccacgtgttaaactacatggagctctccctgtacccccaccaccccccaccaccccaaacaccctttttgttgttgttgttttagacagagtctcgctctgtcgccaggctggaatgcagtggcgatcttggctcactgcaacttccgactcccgggttcaaacgattcttccgcctgagcctgccgagtagctgggattacaggtgtgtgccaccatgcccagctaatttttgtatttttagtagagacggggtttcaccatgttggccaggatggtcttgatctcctgacctcgtgatccgcccgcctcgaccctttatagcaacttcattggataggcatgactgaagcatggatgtggcagactaccacaattactacttgagaccatcactacaacagttactactgttactatttgagactgtcattacaagactgaatgaaggaggatgaacgcagaaatgaaaacttaaaacaaaaataactattttacaggaagggtaacatggggaagaagaagaggggtccctgcttcttgtgagcaagggcagctgcctgagctgcttcagcccttcatatttattgggtagaaagagcagggaggaggagggcatgattggtcagctgcttgattgatcacagggtcatattattactaacaggcttcagatttgcctaataacaagaaacacttgtgcctgggtcatgactgccctcagcattccttccgggtgcagacgcagtttgtcagcttgccaacatcctgctttcatgagaacagtttgctgtttactcatatagcctccagtggtatacttagttgatcacgaccctcattcttttggccttcaacacatggacaactatgtagaaatgtgatttaaaaaaaaaaaggagtatgatttcatactaatcgactgagtggggaaaccctgcaaggctgcctattcagagtcttcttggcctctctctgcagtattcattcctccagggcatggggcaggactccttctaaaatgagggtctcatgacccacagtcagacaaggtaggtcagagaatttccttatggccggctctaagacagaaaggtggaggaacattagagtatatttttagtttccctggcctgccttggggagaaaaaggaacaggtagaagcagaacagaacagagacagaccctattttctgaggcctacttctgaagcctaaatctccccaatattgtaacaaaagactgtccttcacctgtatcactcttaaattgttctgaagctgcttcaggacccttggataaaagaccaatacttcaacaaaagataggcttattgtgttagtcaccaaggaaatagcaaaggctatggaagttatgagccaggaaccatggacaaaaacgtgtgtgtgtgtgtatggtgtataaatatcaaagtgctcttgaaatcctgtcttaaaatgtaataatttgattatattatatcttttagacagagttcatatattatatctattaaaaagagttcatcactcatgggtcctggtgaattagcaatagctctggggtggaagtctttgcttagtttgcagaataacttcactttactgttccctacttttccactttgctctgtcctccaagattctatgtggtttgcatcagcagcctccattgccctctggccatcagttagttgatttcagctgctaagagggacccaccaaacatctggagggcaggtggaaaaggaagtcaggatatttaattccccgctccctgtgtccatgtagaagcagcctcaagctaactgcatccctccatgagtggtcatagctcctgtcaggtgatgctcttcatacagtcatttctgtccctgagttctgtccccatttaagctagagatagtgtgcagagaagagttaacatagcaagcctgactgcttatttttagaaagacctgcttacaaagttggcctttggctgacatctggatccccactatccccagaactgataagagaggaccactgcacttaaacatttgtacaaagtacggtttatgcttaacacctgctttccttgtgggggtcttaaatttgggtaaatgccagatagaggctgctcataggaacagcccccaataaaaaccctgtgcactgagtttctaaggagcttccctgattggcaacacatcacacatattttcataatgcattgctgggggaattaggcccattctatctctactggaagagaattcttggaagcttgtgcttggtttcccctggacttcattgatatgccttttccctttgttgatgaattctgtaacatttcactgtaataaattttagccatgagtaggactatatgatgagtcctgagtcttcctagtgaatcattagacccagggttcagggttggcttgagaaaccctgacataaatagcaaaagagctctgcagttctgtacctgagagtactggaccatctcttttgcccacccttttgaaagtggttcctttattgagctctccccaagttactttttttgagtgtgctttcttttactgaggcttctagtgactgtagatatttcatataaaaatattaattatttgatggattcttttctgtaccttacatttacatatttcttaacaaaaagatgaatggtttaaaagtaaggtaacacagcaacctgtacccttgacatcttatttaaggagaatgtttgattaggttgtgcttctttaaatggatgggggattgtgcatcttgtttaaactagaaaatagtacgtaaactggtggttgattgtccctaaaaatatttagctgttgtttttctcctttatctttgcgtattctggtgaaaaaaaagaaaattcactctcaaaagcagggagactaagaaaaatttacagtgacagaacacaatgttttcatggtatatatttatattatagaaaacatcacttaagtagtgagatgaatgttcttatttcttatgtgcctgataagcaattgtattacatcttaaaaacacctctaacaggtgatggtacattcatatagtatattcaaatcgtttcttgataatatttagattatttaacatccatagctatttatatcaccaaatattattctttcttttacactgtgctctctgaagcaagataaagcattgtgcttaatggaatggaaagcttcctctcaaaaacccaaagattatgctacttaaatttcaagtttcaatggaacttatgtcaacttttaaattaactatgtaaaaaataaatgttgtgcatccttggatggtttctcaaaaaaaaaaaaaaaaaaggcaaagaaagaaatgcttaatgtaaactatggtggttttttacccccaactatatttatgccagctgctttgacctaaaaagtttttttatgcttatagataaaaagctttgttttagagaactcatgaaccctttgtttattaatgtcttggtaaaccacatgtcttcttgataaagcaatcctgaatcagaaagacctctttgctggatatcttacttcagtttgcttttctgtttattgattgctttgctaataaatgctctcttcattgtaatttagctccattccagcaacctccgcccagaggacaagttcaaagttcttctgctatcaatctctcctggagtccacctgattctccaaatgcccactggcttacttacagtttactcagggatggttttgaaatctacacaacagaggatcaatacccatacagtgagtttaagggtttggtaatagaaataaatattctgagaattgacacattagttaagttctttgacattgaggataaatgctgttgtggtttcctctgtctggcacagagtgtttcaaacagagataaaattacaaatttcactagtaatcaaagaaatacaataaaaatgagatgcttattatctgataaatactaatgcttatcacattctcaaagatgaaaaaaaaatgaccccatcaagaattgatgggaatgtggggaagctggaacttttataaactgctgaggtgtctgtgtgagttcattagtacaacttttcatgtacaataatttgttaaaatctatgaaaaaatctttccttttaacataacatttgacttagcaaacttattttaggaagtttatctcaagtgaacagtcattaagtagacacacaagatgtccatacctattctatttgtaacatcaaaatattgaaaatgattcagatgttcaacaatgtttcaggaaattatagtatatggcataacagaatcctggtacattgttaaataaattataggctatgatagcatataaactgataccttagttcacatatcaataaatggaaaatgttcatgacatattgtttaaggcaggggtccccaatccccaggctgtggacaggtactggtctgtgacctgttaggaacaggaccacacagcaggaggtgagcagcaggccggcgacattactgcctgagccctgcctcctgtcagttctgtggcggcatgagattctcataggaacaggaatcctattgcgaactgtgcatgcgagggatctaggttgcacgctccttatgataatctaataataaatataatgcgcttgaatcatgccaaaaccatccctcctcaccttcccatcctgggtccatggaaaaactgttttccatgaaaccagtccctggggccaaaaaagttggggaccactggtttaaagtaaataaagttattaaaataatctgagaattataccattttaatttacaaatactggaagacataataaatagatctagttttctctaattgtaaatattatagaaaatgtatcaaatatttctattataatgaattcaagttttttaattctcaggttaaagaactattaaatctggcagtggagtactaacactcaagcaaatagtgtaatttaatacacacattgctgtttccgcagagatagaacacagcaacataaacttttgaaagagaaaggatataaacaagccatcaagcctatctttgcctttgtaacttttatgaagattttaaaggagcttatagaaatcaaattattagaattcattgactttaaaaaacatttactcagatgttttagatacagtttccctaaagacagaatgaaaaaaataggaatttttacattattccagctctatcttctctgatttttgcttctagccatgtttagctacacactagtttaagaaacctcggaacagcaattccaattcaagtttctattttgttctcttcatttaatacacagttttccaaattctactttaaccatgcttaattagttggagaactgtttaaagctctgtcgaaacactgaaattccataaccttccttaaaatggttaggaggatgccttgttttaacattttaattgactttaaaactcctgcatcgcatagagttttattttgtatgcattatactgggtttcattttgcacctaattcatataactggaatttagtttcttatgtccacccctttctcttggctctacatgtctcttcagtattccaagtcttctttaaagttaatggaaactctgaacttcatgatgcagattgcaaagggaaatgaacatctgtctacatctgccatgttggcaaagtatcctgaaaacctgctactagaatgtttattttcttccaaatatcagcatgatccaggtgtcctgaaacttaaacttttgtgacagagaaagagaggagttataaaaatattgaaaatgattttgaagatgacagtaccactgattatttctgaagttgtgaattagggtcaccctactttccatacagcttaatgcaatagcaaaattaaacttaaaactatcaatgatattattcaagccagaggcatgatttccatagtaacatattgtgatctattttatagaacatcacatgttagtacaacattggctgtttttgacgattgcactaataaggaatccaaataacattttcttacataataaatgtgtattcattcactaatcagacatttatataatcctattaaacaaggtatcatttcctaaaaccatatttttcattaaaaaatgccacttctggcatttcttgacaatcactgtaattaatgatgtgaaaattatctgcatgatggcatttgaacagtaagaacaattggttaacactgtcagaactttgtatcattctaacaatagcctcatgtttattactctatttctagtgcgtggctagcatgtgtaacatgtaaaggaaacactacttatattcagctggatgaacacaaatctttgggttaaataaaggcattaggaattataggtggagaatcattgaacttttcaaagaaaattaatagtgttgtcttccaagcaagtttgatagtttgtttgagacctttatagaattcttttttagaatggaaactttttctagctggcctaatgtactatgggattctctaagacatattttccttcttaggatcatgatatactggtgtaccatctttaaagctttcaaattatttgttattataatagcatgcaaataatgaataattttaaagattgtgaataattaactttaaaaaacaaggtatatctttacgttttatttaaggtagaggtcaagctagcgcttcgagaatcatacataatcagccctaacagtatctctattgtagcccccttctgggttgctcataggtatcttacgtgtcataggaaggaagtgaacagttattggaggaaatagcactcttctgttagtgttgcaggtttagggagtggacagtaactcatactgttttttggtgttgttcctatttgagtttggaatcaaaggagcactagacatagtaggcagatcaaatttaaaaataaaaacgatcttcattactgatgaaagtcagattagagactatatcctttttcctgcaggaagacaaattagaagagagaaaaatcaatgggctgatctgcacataatttgctccctacaccctgactccccagattcacagtcagatgagttgttcctcatttgggatggcatgaatggggagatagcccttaaatgtcactttagagaaatccttccacaggaactagaggatgattatttttacatgtaacaatgacttctatcacctacagatattatcgtagtttaagcttagaattttagacaaccaaatattttaatgagccctgggatttcatttctacccttattcatttccatctttaaaattataatttataatctcatactacatcaagggatcaatgtaacaagtggtaagatgattcagttagctctgagaggaataaatgaagaaatataagatatagagacaggatgagaaaacagaagagaagatgacaggcaactgtttttataaggctcttaatattcttaatgcggtagtttccccttatccatggttttgttttctgcagtttgttactcatggtcaacaatgttccaaaaataggtgagtctacagtacaataagatgttttgagagagagagaaagaccatattcacataactattattggggtatattgttataattgttctattttattttcagttattgttgttaatctcttactctgcctaacataaattaaactttatcatagatatgtatgtataggaaaaagaacagtatatatacacacatatatatgtatgtatatatatgtgtatatgtgtatatatatacatatatgtatgtgtgtgtatatatatatagtttaatactatttgttgttttaggaatccactggagatcttggaatgtatctcctgtggataagaggggactactatattctttcctggaacaatagatcaaatatgtatagaaaaatcattcatgtgtttaataaaattttgttcagtgcttattccagaccagaaactgtatcagtcattagaaatacaaagatgaaaggaatagttctccttactgagtggggagacatataagtaaaccaaagtaacaatagaatatataaatgttgaagcagagtaaacttggggtgttaaggaagcacacggtggcttgggaggtgtaggaaatgtaaccatgcctgtggtggcaatgatgtgatggagaaccactgaaagtttcccagtaaagaaagaatataagctgaattagccagatactgtagttgaggaagcgtgatggtcatgaaataaattttgtattaaaagaaaataaggtatattcagcaatcatgggcagttccatgtagctttggtaagtggtacaatgggggagtgctacaaaccaggagggtatcagccaagatcacaaatcagtgctgagccaaggactgtaaatgtttctctgaaaatgcagaagtctgtagtaacagcaaattttcaaattcagtgttaaagatccgtaccccaaccaaggagagcaactaccttgagataagcactcttttaacctgagtattatttttttgttatggatcattaatggatatcctattcataccctttcaaatgcttttatatctttcacactataaattgccttatatgatattcctacacaaatgcatatttccatcccaattctatctgattctaatttcttattaagtagactgctcttgtataatacattctgatctattaggattatattccacttttcagatgctacaaacattcagcaagtactgtacttcttttaattgtcatcaggttataagtcttccaacttccagtttaagcttatgccagacaatcttttggaatattcagcactgaaatttatttttttcttttaggttttggcttttggcatgctaaattattttccatcgttgttctagccttcagtgatttttcaaattttgttaatgttttcaacaaccttattgtgggataagggtaactttaatctaatctagtaaatatttattgaaataacaatgagccacagctgcacgctctctagaaagtctgaatctcagccctaggggacttttccaaatatgatccttctttgggtgctctgccttagcactaaggatggtgactttcccctgtctcttctattcctatattctttagagttttctgtaccacttagaaagtaaaaccaggcgacctctggtacccatggtacaactgaaaacagccaccagagagagaactgtctcaccttcctcggctctatcagggtcatctctgataagacagtggccctcacctgagtcagtgcccaaggtgccccccacaacaccagcggaggcctcctccactgagcagtcggaccccagagtgctctgtaggagctgtagactgggaagaagggccgggtgtggtggctcatggctgtcatcccaacactttgggaagctgaggtgggcggattgcttgagcccaggggttcaagaccaacctaggcaaaatggtgcaaccctatctctacaaaaaatacaaaaattagccgggcgtggtggtgggcacctgtagtcccagctattctatttgggagactgaggcaggagaatcgcttgaacccgggaggcagaagttgcagtgagccgagattgtgccactgcactccagcctgggtgacaaagtcagaccctgtcttcaaaaaaaaaaaaaaaagaaaaaagactgggaatgcctaggtttacacgatgggttatcactccaaagatttgtgtcttttgtggccaatggcagatccaggaaagaaatgaaagttgccgatggggataggctgggggagagcaatacagatgtgtatgggaaaccccaacccatatatattgtaaatagatggactaggctaaacattgttgctgtttcagtcttctgcaaactcagcttttccacaataaagctctatctcctgtcggaaggaaggaaggaaggaaggaaggaaggaaggaaggaaggaagggagggagggagggagggagggagggagggagggatggatggggggaggggaaggggaaggggaagcacataaatatgctgggaccttcatattgctatagggcacccctgcttaatggaaccctcctcgcatctccaatgcaaacagccccatggcggagcaggcagcagccactctggtatttgtgtgtttcgcagtcctacagtgtgtttcctgtccttagagaacaaggatttccagccatgtgcctaatcacctccactccctatcttattttttaaaaacctctttgtagctgcttctctttgccctcacaatccttcatgcatagaagtcctgcttatctaaaacttctgttgtgtaaattcctcattgctgataacaaatgtctccaaaatttagcagcttaaaacaataaacatttataatttctgtaggtcagaaaataagaaaattttccattcaagatgttggccaggtgacagatttaccccttggtggtagtttactgacccttagtctggtgtgtttagtgtttaacaagcaaacaagttacatagaggaaacatagttacttttctgttttggagaaccgcaaggactttctcttagaccttctaacaaaaggacactatgaaaagcaaaagaagaactaaaacaaacatctaaacattctttattatgaatgatactttcttatactcaataataaaagcaatcaaccggtatttacattatttcaattttaaaaatatgaaatgtatccttaatcaaaagagtagattggtatagtttatgtaattaaataatatgataggaaagcagttagcaatgattcttcaccaacttgtgaaatgtaactttgttttttttttttcttttcatttcaggtattcaatacttcttagacacagacctgttaccatataccaaatattcctattacattgagaccaccaatgtgcatggttcaacaaggagtgtagctgtcacttacaagacaaaaccaggggtcccagagggaaacttgactttaagttatatcattcctattggctcagactctgtgacacttacctggacaacactctcaaatcaatctggtcccatagagaaatatattttgtcctgtgcccctttggctggtggtcagccatgtgtttcctacgaaggtcatgaaacctcagctaccatctggaatctggttccatttgccaagtacgatttttctgtacaggcgtgtactagcgggggctgtttacacagcttgcccattacagtgaccacagcccaggcccctccccaaagactaagtccacctaagatgcagaaaatcagttctacagaacttcatgtagaatggtctccaccagcggaactaaatggtaagaatccaaggctgagattcccctttttggtcaagacatgaatgagaatctattgtaattgtgcaattaggaatttggcagttgtattcctttttataactgcacaatataataattgagaaacagtttctaaagatataagatagtatttgtcctggttagtggaacaagtgtatttcttctaatctaataacaaattccattcaattaaattgccccttaaaaggctaatattatctttgctcttaatgacatctgccataacacaaatgatgtttataatttgaaactcacttatgaaatgcattatatttgactgtgtcacaagttagggcacccacaagcagtacatttttctcttctaagcaagaaaaagatataaaatgatacaaaaaatatgtatataagctaactgactccattaagttaatttttgcattcatgcatttgaacccttggttatataggccagacacacattcacagatttttaatcatttatatcatgtacatattatagcaaaatctttctttagatttgtaaagttatttggtaaaactgggtagagattgactataacatttatgcaaacagggcttatgttaaacaagttaaattaaaacctccaaatttgaaaggatacagactggagctataatgatcaaattccccaaaagaactggccattcttaacagaaattgtgaatatcaattctgaaaaagattgaatttacctatgataaagtgtagttattttttgtctatgtgttatccattttggtttgttttcctcatgagtatgcctttaatagtattttatacattcatctatatagcagtttgttgtcttctatgtacctgtcatctagattactaaactactaaatcactacattttgaatgctaaagaaattgacagtaatctaattagaaagacaatgaatatccagcactctttaactgacctgtccctaccctacccctaaagtaacccctttgtctgatgagttacgtaggttcactatttaatttctctaggaataattataagatatgaactatacatgagaagactgagatctactaaagaaaccacatctgaggaaagtcgagtttttcagagcagtggttggctcagtcctcattcatttgtagaatcggccaatgaaaatgcattaaaacctcctcaaacaatgacaaccatcactggcttggagccatacaccaagtatgagttcagagtcttagctgtgaatatggctggaagtgtgtcttctgcctgggtctcagaaagaacgggagaatcaggtaaagatcaatgttttaaattctacttttaaaacctctgaatgcaaatgtttcctcaaattaaagtcaaagtactgtgaaagtacattttgaaaagcaagaattagaaacttccatagaccaaggaaaattttcatatatatggatttgttacataaacaactcaaggtcataaagtacttgcagcaagttctagggggcaaaagtaaatgctttagttattaattcatggggcgaaaatggcttaactatagttatagtcttctgggaatgtttgtcaaaaatagcatttggtttccactcctgaagtggattggacacatgtctcatcttgctccatatacagcctaatttatgttcaatgaaagagataactgtcaccaattccacaaatttgtctttgtttttatttatctttccaaaataaatagtttagatactagattgtacataatgacagaatcgtggacatcaaaatctataattcacaagtgtgcttgtaagcagttggcatgatgataaggaaggaggacaacatatctaaattttctggattatcttcattaaggcaaaaatttttaatcctccactttattttttatattaaaacacttcaaatttcatgagcctttaagaaaaaaaatacacttttgttatgtgtttaatctgtagatatcaaagaaacccaaaccctgatctaaacttgacctgttaggaatatggaggatgagggtagctttaggttgatgtccaagggaatcatttcatgaataaaatacgcattgtgcttgagcatctcttaatgactaccagccatcttggacaaataatagagccatgatagcacaagtgatgaggcatggcattctggaaggggaaaatcaaggtcagaaatgaaaagtaatgggtgaaactgcaatactggtccctcgtaatcttatgggtcactagctaatgaaagtgcaatgagttcctttgataatacacctttggttagcacatttaaaatccctgtaaagagctcaggagtggcaggggggaaagggaaatgcatgtgtatgtaacctgaacatttcaagaaaaatttaacaaaaactttgagacattcattggggttatttagaatgctttaggtttacctctttctgaagaataatattcagccagctgcattggattggctcaatgacatatttccctacatgggaaatccagtacatcaccatgcatttttctgaactttttgaactgagatgttctatttttgtgacgttttttagatactcgtaagacttataatttcctatctatccactttcctatctttatgaacatgagcaaattcctatgagatttttattttgcaagtagaaagtagctggtaatatgaagatggagaatatactttcagataacattttaaaaagtgaataccttttacatataccagcatattcttggactttttcaaagcagaatattttaaaaggtaaaggtatttcagaaactaaatgaatgtgtgaattaaatttaaaaatatatagggacgacattcattgttttgatgttattgttattgttctcattgatagcacctgtattcatgatccctccttcagtctttcccctctcttcgtactctctcaatatctcctgggagaagccagcagataatgttacaagaggaaaagttgtggggtatgacatcaatatgctttctgaacaatcacctcaacagtctattcccatggcgttttcacaggtattgttatttttaactaatgtcctttcagaattggcttagggcttcatttggacattttttgagtttgcagaattctgtgacagaattctccctctatattgattaaacagggcattttttcttaatataatattatgtgtacaagcctccctctttgtatgtcacttgtatttttccagtataatcatatattgaaactaagttggtataatttatttcataagacttgttttttttccatttatcatgtatccttaaatattttacatgaagttgactttcattaactgtgtactatcatgttatttggacacacaataattatttaaccagtccacactcagttgatattgtattgtattaattcttttggaaatataaataacattgataaaacttcttatatgtacatttcatatacatttctacttcaaaaatctgaagaattgaatttatcacagcttataacaaaatgaattatgaatatgttcaaagttttgaatatacagtcatatattgccttctagtaattcatcccccagctagcagtagtgagaataattatcatagctaaaagttactgaggctttactgtgtacgtgaactaattcatctgatacatacagcaatcctagaggataggaggctcttgttctctccagtttacagttgtggctgatatacctctctgcccattttaccagcatccaggtggccaatagcagaagctgatggaaggatgtcaaccgaacaagttcttctgtgtatttggctgttcagtgcctcctctgagagagatgctcttctctgggcattagcataagataaaaagatctttacactttatacctactcccatagatctagccacatttttctttccatgaattcctagttcctgatccttccatctttttttttcatgcccttggccaatatttccaagccactgccatattgtccaggtacattttaccttgagacacgtctctttccacacaacatgggtgaccaggtgaactgcctgaagttctgcccactaagaggatttcttcgctctgctgtttcacagggtcatctctgacaagggttttagagcaacagctaccatttagacttgcagccacataccaagacatcctatctgtaaactaaattctgctttttttccacattctttcagctcttaagggacctcccatgggtcataggtatgagctgaggttgagccaccagtataagaatggtggatgtcatgggggcctgaaccacctgcttgcacaatgtattacggcttttggctctgcttatacccaatctcagacatccacttccattttatgatgaatttctgttgggcccttctaacctcaagacttggctgagacaattccaagattataaaaaagtagctctagctgcatggctatttggtgttccatgaccagatgttctgtttttactgaagcctgaaagcatgctagggccatttagcaaatggtatatagtttccattacatgttatgcctttgttccaagctcttggggtctatctgccctgtgattctctttctatgtgtgccttgcaacattttttcccacaatgcttacctctagtgctgtaaaaattactacatgttatgtcccaagtggctcatctgcctgtaccacaggctggacctggtgcagagccctttccgcctctgggatacactcaaaactggcagcattccatattactcagtaaatttctcagaacagtattctcaaatgtggaatatgctcccttcagaatgtgaagaggtcaactagacattttgtttccttcttagtggtggtagaagcaaggtgcaataatttgtcctttattttggaggggatatcctagcatgtctcaggccacttgaactcctaaaaacttcactgatatggtagattccttaatcttcataatattgctgtctcactttctagaacacatatgtcttacctctgcatacctaccatttcttgtttgtctgattcatttaatatgatgctatcgatataaagaatactgtcaaggtggcatttatagtttgtcttaaattggtgattaatcaccctcagatttcctttgtctttcttcagtgcattgatggcgaccagcaagatccatgcattgtccttataattactagtttccccagagtagtccttgtaattactaattccaccaaaccagtgaattaccttctactggtaactcatcgcagttcaccactaatggaagtttaagcattgcaccactagggcatgctgtggactgttagtactctacctgctgtctatgatgagatcattgtaaaccagcaagtggatgatggagctccaaaatatcattttagagtctccttcctagggccagtcctgttacgactatcttagggcaaattcccccggaagcagactcttggtagaggactgagtacaggaggtttattgggggaactctttcagaaacaacaaatgtgaagtgataaagtatgtaggattgagcagcaaagaagctgaactgtgatgcaatagtggaagcagcctcagcggattccgtgggtagttctggagctgaaatgaccctcttagcttatctcaaattaagctaggaagtcagacctttgtaccctagagtatttgtgtcctcgggctggtgtaacaaattaacataaactgagtgtcttaaaacaacggaaatttaggtgttagtacagccaggtcccccacaggctctaggagacaattcttctcttctacctacctgtggctcctggtgttccttggcttgtggcaacataactctaatatctgctgcctctgtcttcacaagtcctactctgtgtctctgtctcctctgggtctgtgtgtccgtctcatttctcccataaaaataccagtcattggattttaagctaacctgaaatccaggatgacaactaattaattacatctgcaaagaccttatttccaaacaaggtcttattctgaatttttgggagacactatacaatccactactaataggtttgccatttttttctaagcctttttaggagaccagaacccatgtacaacacacaattttattttctatactgatgaaaaagaagagccaataaataatttatgattacttatttttcattaatctgtctacgtgttcactcatttgcaattatctcatgatgaatacacaactggcataatatatatattttgacttaaacaggttagtctaccgatctggtataccatgggatttaaggtaaagttagttgtaactttcatgtggtctttgccatgttgtatctcatttatactcaatgttttattttgttgtttttactattctctggctttataaactattctttctttgtaaaacacagttttgatttatctattacttatattatagtagttgttgttctaagaaaaaaataaggtgagaaatattatttataaaatacagccttagaagtcaacctgtttgttcatattccacatctcccaattattagctgtatcacacgtctctctgcttctggttttattcatctgtgaaatgggaaaaccatttttgctcacctacctgcttaaagagcctgataaatattgacacattattattagtgattattattaatggtgtggaactacattatactttataaactagctatcatttaatggggcaggaaaataaatatttttattattgttgttgttatttaaaaggctgttccttatggctgaactggaataaggacatagatatatcaccttattctcttttttatttttatttctttgagacagagtctcgctctgtcacccaggcttgagtgcagtggcgcaatctcagttcactgcaatcttctcttcctgggttcaagcaattcttgtgcttcagccttccaagtagctgggactacaggtgtgtgccactacacctgactaattttttttttaatttttatttttagtagagacagggttttgccatctttgccaggttggtcttgaacccctagcctcaagtgatccacccgcctcggtctcccaaaatactgggattacaggcatgagccactgcactgggcctaccttattctcttttgaactctctctcctgtgcaaatattctctgttcaaggaaatgaaatcaaaagtagcagaacaaagtccaattttttaccttctcaatgattaaatttgtatctgaactgacctgagtatgtcttgttataatctttgtaaataaatagccaaaattcccagggaaaatctactataaaaataactagtaagaaacctttgcctaagaatgagacaggggggatacgtaaaagtggtgatgatgtaggattcattgtgggggatcaagctgctgtagaatttttcctacccctttgaagacttatttcatgaaaaactttcaattagatagattttataagacttataaattgactctatgtacatgataaagacaaagtctatccaagtgataattttatgctgcaagttctggggccaataatgtatttttaaaataatgtaatttataataatcatctgtaaagaaggaaaagccttttcaaaataaatattagtgtagatttcttctttcttattttatttcatcgtgggttcttgctacaaagaatattttgcttaaaaaatagttgtacttcctaaattaaataagaaatagcttcatgtactttatcctaaaaacaataccattttctaaaaatttacattgaaatctaccaggattattctaaaagggatgaatattacagcaatattcataagtttaactcagttcaaggtttattttacttagaaaattttaaatcacatttcacagaaaagtttgtatcttcattatatcaataatgattttaaaattagaaaaataaagaattacttggtatttgatgtttttcttatttcaaaatgtaattgcaaggaaatggttttaaagttttaaatttaaattattcctagagttttagaatctttaaaaacacctttatttctgaatgttattgaaacactgtattctacattccaatctcactgctttttagaacaactcatgtaacttacgaaattttaaagtcaacacctaggcaaatattccaaatgaattttattttacccctaaagagaaagtctctagaaaactactccaaatgttactgaactttacatttatctgtatttatatttatggaagattattttatatgactatgtatcagtagccctaagaaaattagttttgtactcatagttactgtcatactctctgttttaatgacttttattttctgaatataatttctagtggcctttgtacctacaacctaaacaaatttacatggttgcttttgatcacttcaaattataatgacagaaccaactctcaatgttaattgtttaataatttatttatggactgtgagtttcctgtcagtcttctttgctcaaatctgctattttcatttgaaattatatgataaagataatatttcaaataacgtaactgtttgatctaatctttatatgtttgtttatataagaaagatgattgagaattgacttaacgtggatgctcagtaatatgcttaatgtttaattttttcccctttttcttctgtgactttttttcataaagaaaatgatagtatcgatttaacatagcaacggcatttctttctgtcctagcaccatcaaatagcttgggtattactgctctgggttacttttggccaagccccatggctttgtttggactttatcatgataacaatgacaatgtcaccgtctttatctctaccattggtgacaataaccataccaccatgctgctttatgaggcaataacttggttttctcatttatccactcaggaactggattattacctcataaaacagtgtgattgtacaataatcaattaaatcctggcttgtcgagactcttcagaaaaaaaaaaaaaaacccttttcctaatggtggttggcaataattccctctgtctgaattcatggaactttgactgccaaggttatattttcacactgattacctattatctttctttctttctttctttcttttttgccttgaagctgttgcacactgctaaatcccaagaactatcttacactgtagaaggactgaaaccttataggatatatgagtttactattactctctgcaattcagttggttgtgtgaccagtgcttcgggagcaggacaaactttagcagcaggtaagcaagttttaatggatatgaaaaatctgttgcctatcaagaaaaaaaacttataatattcaacaccttctctacttgagactttatatttgtcttctcctccctcactaactctgattgcttcttacctcaacagttttaaacaacaacaaccaaaacgtaacttaaagaggtacctaggagctacgagttacagctgtgtcataataagaaatataattagtggtagagtgactccactctacaactagaaatatatagaatatacaactagaaacatatacaaatatatagaactagaaatacatagaaatgtaattagttgtagcgtgactccagggcttaactaccaacctgtgtcctagcagtgtcctgacaattgtgagaaacaatcaggaagcttcttatgaggacgttaggatacctcttccctcagtccagacattttttgtaggcttggctctactcactcctgatccatgggaacatctagaaattactgtgtggcctggtgttatatttggctttcatgaaataggtaaatgtttatctattgttttattaagaagaagcttttaagttaataaaatttaaataaaagaattgttattaagtataatctgagtagaaatggtttgtataatttgtgcttgcttcattcaggactaactggattcatacaaacctgattacatgtattagtaagacttataaaacccaattatttagcattaatatattttcaaatcagtgtttttctgattctagataaaagcttagtttcctggttatctttaaagaaatgtccatgtgtaaggaggttaagacactctagatgaattacagatattacgaaaattcatgtttacctgtaaaaacatttcctagacctcctccccaaatcccttcatcctattattaataggtccaattatgtagggttttttttctggttctggaaaaaattgcttagctcaaatgatctcatccaagtaatttatttttttcaaaattttcattaatgcaaacaactctgaaattctaagaaattatggtttactaaatttataactgaacactttgtatttttatgtattttatagatgtgcatttcagatgcatgaatacattgatggagtacctagcttgtacaaaacactcttctcctataaaactatctgtttttgtatactgtattattaaaggtttactgaatgctgaatatggacagcagaggaggactctatctcctttaaatgatacaatttcagactagaagacaaaaattaaaataagaatcagtcttacaagttggagaaagtaaaaatggagacaacggagggtgaagactgggtgtgttatagtaggggacatagggatcccaagcacgtggccatgcaaaactggaatcacatcctctcagggttgcaaaacatgtaaaaataatctagtgttactatatagccagtatcaatatattctttgtaatattcccccaagtgttcatctaacccatgtctgataccttcagtgttacagaaactactacgtctcagacaaagctataccatctttagatacctcttttagaatgtgatttcttagattggtcaaaaatatctcctagtaacttctactcaacattcttattctacttccttgggggctgtcgttaacctaatttatcatccttccaataacattttcaataacattatatccacccaagtcttttctcctttaggctgcatatcatggtggttcccatctgaacctcatatgcaatagtgtctagagctgttattagtataattcttgtagatgagatctagtctgccttttcatagatataagcaaactaaagaacctgaagagagacatgcccgtccctagaaactagctggatcatggagatgggaatagaagagcaggaaacatgtctacagaatagaatctgcctgccctatgcattagtggtaacatctgtgctaatagtatcctcattggttgcagtggcaaaatcctgttgcgtaaaagatgatgtacctgggtgctctgtgcagctctcattttagttactggtgaggcgattaaaacgactcctgtccactggcaggattgtgaagtaaaactaactagtcagagccctctgaatcctctctctattttttttatccttgaaaaatagaactggaaacttatattcgctaaaagtcatgtgacgtgaaagttagttgacttacaaaaataagagtttattcatatatgtgaggggaaaaaaatggttagccaaaatgccagggtttcaatccgggctctgccattgactagctgtgtgaccttatataaattatctaacctctgtgccttagttttccaatttataaataagcataacttatttgtagggttctgatgaggattagaattagttaatacatgtaaaatatttaaagcagtgcccatcacagttcattctcaataaaaatttattgtcatgatttttatcataatattatagaagacttttgttagtcacagtataaatgttatggaatttctaatgttatcaaaatcaaggagagtttattttacaactttgattttctaacattattataaaatataaaatggagagttctaaaactaaggattgtattgtgaaaataaaacttagaaaggcttaaaatctgaaagcattatttattatttctgtaagaagtatgtcattcagaattattatgcacatttcaaaactttgctcaaaaacagcaaatttcacatttgttggttgcaatatagagttaataatgtgccataaatgtattattactacattttattgtgaatgctcaattcagaaccatctcttgagggcttactatttaaagcactgtggaggattctaagataattatactcagcatttgggttaaggagttgagatccaacaggtaggattaacaccatggcgacatgtgctaagggctgtgagaaaggtgaaaaaaatgctatgggaaggtagaaaatgagataaatgattttgatttgggagactgagtagatacctcattaaatgctatttcagataaactataaaagaatggtaaagactttcgcagatatttactgagcacatacaatgtgctagtttctgttttaggggctggcactgttccaagtactgatgtaatgaaagcagagatttatgaagacttccctggtggtagagtacacaatagattagaagagggagtgtaataagtgtctggtagacttttttaaaaaggcaataagagagtaaatcagacgagtagaagtgaagattgaaagaagggaatggagtgacttcaaggaagacagacctggaagttaagcagtgggaaggatggacaatgatagcaaatattgcagcccatggtggtgccattaaataaaaggggaaagatgaacaaagaacagatgggagaaataaactcgtgagtttatttgatcatttgatagaaacacatccatgccaattataaccatccaggagcagaaattgcaaatctggggcttaaaaatgatgcagattttgtattcatctgcatatagatgggagctaatgctataggttataatcaattagtgaaagcagagaaaatgcaaaatggaagcccaaagaaaacaccttagtgaatattctatctgggaagaaagaagaaaggaagagtgaagtgaacagaggtatggtcagaattaggaaaagaactgagaggaagcagtatcagaaaagtcaagggaagagagaattctagaaggagaatattgtctgcagtgtcatatggtatagggaaagcaagagaaatgtgacctaaaatggatgcgaggtcactggtgactctctggggattaccctaattagcatggttgaagcagaagctggaacatgaaggattgagcagcggcaggaggagatatagtggtaaatttcaaatgtgtttttttttttttattctttgctaaaatttttcttctacccaattttcattcttcaaaaaattgtattaccttttgtttccatataaaatcctttcttttctaaagaaaaatttattttagtgtttgtttttttctggaaaaaatgtttattttctaattccttaatatattttgttagaactatctgattcttcacctgcccagcagaaaaagaaagtctcttatatgacaaaagtatggaaaaataatttttacttacagttgggtttattataaaatacatcatttttagggttgttcagatcagtgaaaataaacttatttgcttttatttgaataccaggaaaaaattataaatccatcattctttttgcctccttccttattcagtagatgaatgtgtatttctaaatgtttttccaaaacaaaacatctgaatagaaagtatagacattaaatcatagaaatacactgcagacctataataaagccagttctttagaatggtcaacaattttgctataggagagtaataaaagttgacttgcaactttactgttcatcctgctctgttttttctactattaacattgcaatttggagagtatatattattccaatgaactccaatggatttgtgggaaatttaactcttatgtctaatagctcatatgagctcattatcagacatcaatggaaacgagtgaccattcaaaaattttgaaaaagagcaccacaaattagaagtagtaattagccttttggaagcatttgaatcatgaaaagatatgttgcccccttaaatctcggtctcaaaaatcagaaagatacttgtgaagatttatcttgctgtttcattaaaaagcttgagaattataattggctctctcttgttttaaacattttttcaattaaatatatgattagaatgggtacatttcatccagagtattgcactgctgcttctttagtttcaatgcctgtgacaaagtctgagaactgatttgagagaggtgttctctcaggagcagctgcatctctctccattgcaaaatcttcaagcagtgttattaatggctttggagttgcttctgggtgtatgaaggtaatgagttgatgaactgggccctcttaaaatccttgttacacttttctttaagattctccttttaatccgagaaatttgtgcatttccacccattgcaaattgagtttagtttaaacccttcttatgagaaattacttttggagatccattcctgaagggacaatgtgatatttcccttgcctgtcataaattgacctccatactacaagcttagaagtgcccatctcgcataaaacaagtaattggtgtgcattaaattttctttctgaatgcaaagtaaaatgtataggctgtttgctgctgggttgaaaacacacattgttttgcattcgggtacataagtcttttccttgtgaataggagccagagtgattaaacaagcactcttaatatgttaatttataattttaattacaacaatcttgtatatatagtcattagtgaatactaatataaatatttttctacctttttattcataatgcataaaccaatcacccagttacttctctgaggttgcctgtttttgtttcataatacaatctttgttcttagttatgaatgcattttgttcattcctgtcttcaataatccctcattaagctagtcactttctgctccatgctaaaaaggaaaaattatcatgcaaatgtggcatgccatattaaaaagcacattaccaaacacttttgttgctgtccttcaattagtttcccttctttgaatttaattccatttgttgttaaactactgacttgatgtatggactcatgaatctgaggctgctgccaagaaagtggggaaaaaaaatcaaagcctcttcgaagagctgcagaggcgagctgaaatgaatttgcttcacctttgacaagaacacttgaacagcattggaatcctctgatgattcaacttggctaattatccaattatttatttcaagaataaaggcaccattttacaattaaggaagtgtaaagtagtctgagaaatttggtaatgacagatgacttaagtaacttctaagataaacagtatctgtgcaaaacttgtcccaccaattgttttcaggcagcagttggtgtgtcttagcatcagtgaaatcctgagtacactgaaggttttttgtttgtttgttttgctctttcaacagaaattattttacacttgtaaccaacatgtcaaatttccatggctcttaagcaatgtttaagttatatttctcttgattaaaagctttcggttcaaagcaatactttttaattgcctaatgatataagtcagttcttaggaaagaaccgcacatttaggagttcatttgcaatataactgaaaaattcattgcatggcagtaaaacaatttactgttaattacaaggagaagaatttgctgtagcatgctcgcagattgccatgaatcatgcagcactcctagagatttataacagatgtgtaaatgggatgaattagcagggtttaataacagagacacaaatcatgcagacttcaaggagctttaattgatatactagaatgtgacgggcatgaatcactcagccattcaacagcactgtaacatatggtcagctcaatatgccgcatcttaaatcggttggtgagtcgtaggttgtcccatatggtggaagcaatacatttttcatgattaaaaaaaagaatccattttttaaagaaatatgattgcaaagcatgttattgaacagtcttctgaatgccaaactgctttttttaaatgcttttttttttctttaacatggcagcttctcaaaataaataggggctactccttgtaataccagatcgctggaggcattataagaaccaaatcggtgcttgttggcacactcgatccacagcaagcctatagaaaagcgcagctgatgattgctgtgattgtcagggaaatccttcaggctggggcaaaacaaacaaatgaaaggatgatgtcactttcagagaagttcaggaatgcccagctttgtaaattgaagaaaatgagttggatgagagatccctgcttagcagggtaagaaagtggctgtgataaataataccatgacccctaaggtaacaattggatgtaacattttatactaacttcttaattaaatgctcagtcctacaggggcatgtgaaaagaagcactggctggtcatcacatagatggtagcaccaattccaagtcattcttgaagaattatttcagtatctgcaaacaggtaccctggttgaagactggtaactggtagtgtgcaaacatgtttttattggaactgggatctggcagcttttggaaaagcttttgctgcattagtaaatctgacagacttgaaaaaggaatattgcagccttagaactgtggctgccagaatttaatgtcaacaattaaaatttattttgatccttacctagtgtttattactgtttgtatacacaacagaccttactaatacagagatgcactattagatggaattaccatctgttcagagtgaaatgctggcatctgtcttagatgctaaaactaaaatgatattatttctaacaaaacaaaattaactgctttttactcaccaactttaatttgtagtgtgtagttgtatccaaggaaaaggcttgattttgaactatgtgatgacctctgtggccaggtctatatttagatatgcgactttatcaggggctctactggcctttttggcatatgaaaatggcatgtagaaatcacactttcaatacacaattatagcttcataatatactatgtatcctataagtcattaaaacaacacaaccaagctatgtaaaaattgactgaatcagagagactctactatgcaaaatattttgacagatacgccctaaaaaactgcaaggaaagaaattaaataggcaaaaaatcatctgaacaaagttgctataggtcccacagtgacatctttaggaaaatacaaactgtatctttcttctctgttagactattttaaattttctcccacatggacatatataaaaaatttacattcagtgccccctccttttaatttaaagcctaagtatcctattaaaataggtctttagcttttggaagttagagaatttggaggatcaaggacaatggtagtttccatactgatgttagatcagtgacgctactttctgagaagccagacttctattctatatatcacaaaataataaattgtgtcacaccagcatttaatgcatgtacacagtgcattaactgtaactgtagtacatttatttgtgctgcaggagacttgaaaatgatgaagaaatcgatactttgctgtcagagaagcaagtgttacgatgcatttaagtagttaattgcataagccccataaaagcttcaagtttgggtagcaaggatgccataattacagtctgagcaactaccttttattagtggtggactttagggaatggtggttgctgtcatcattgctgctatatgtgcagtttagaaataatggatcctcttctctcttcatgtgtaggatggtagttttgtgcaaattattgtgatcgccagaacaataactggttaaggtagtgtttgttcaccatgttcactgaacttctctaaaagcagggttttctttatgtcacagaacacatagacaaatcatatttgtatgccatgctaaggtaaaggaacaaggtggctgagagctgaaggggataaaccagaggggctcctgctggcttcccaggagcaaaggggatcaggatgtctggtacccattcgtggcttatgaacttagaagtactgttttaaattattcaaccaaagaattttgaaactggaagaggtcctagacataatcaagcctgtcactctaacaattgaagtaaccgaagaatagagagacctaataatggattaaccaatgttccataatcagggtcttaaagagccaatctagagcctacattttctcctttccagatcttctagtaatatcctctcctgaaggtgacttgtcaacaaagaagaaagtggcaaaatatattttattctttcttccctggtcagataatagacagtcaacaagatgatgctgagtcacccctgagagtttcgggggaaaacttttcctctttaagacactgattggtgagcagctgattctgcagcagtctctctgcaacagagaaatcagggctcatgacctggacttcttgtttgcgtcctggtccagtgcccttttgcaagtgttctggcctagcagtgtttggcaaattgtatttcctggcatagttttgcatttctgcgaaaaagtcaaaatcatattctattgacagggtgcttattaagaatgtcttatgtagtctgctccccacccacccctgaaacatagaaaaattgtttattcttaaattcttgtcatcatcatagaaagctgatgatgctttaagatattgacacagccatacagtcttcataggcaaaaaatgaacagattccttaaaaacaaatgaacagattccattttaaagaccagtacctcagaagagctttgttcagcttttagttcttatcctatggtgctcaaaatgctacactacataaattttgcaagtctaaatgtattcatttggatatactactaattatgttataaagtaataaatgctgcataaagaatgcatattataacattttataaaaatatctatacatcgaatagatagacaagaaattagattacccctattaaaaaatacaagtgctattttaaaagtacaagaattttgtacttttattcaaatagacattttattcttagaaatgatggataatgaacattcattttaaactttgtatattatccttagaaataatgaatattgaagattcgttttaaactttacatttacaagaattttctgggtaaatacagatagattttgaatatagatgaattgtattccttaatcatacataatttgaaagatttgttcttgtaatgatagcaccttatatttgtatagaaacttgttttctaaaacataaagcaaatatgtatattgttgtagaagcaattgttgtcaatgtatgtcactgaaaatgtatcctcatgttgcagatgggaaagtgggagcagatataaagggatttttctaagatcacacagatttagacattaaaaagtgaaatataatttttaaaagtctaccaaatccctttcattattcagtgttgtctcttaacgaactgttttgtaaattaacaaatctttaaaagtcatatctacttttacctatagttccttttccttgaaaatctgacgaataattcatcattaccccaatctcttggtgattctatgtgcatgtatgtgtgtgtgtttaatggttcagaagtatctatttttcttcttattctacttgtgtgtatgtgagaccagtctagtttaattgattgacaatttcacttaattcccccttccagccttagaagaactctgaaaagaataactcagtaggatgttcaccctttcaaacaggcttagttgactcctccatgtgaaactgtaaaacacacctactggaatgttttttgttttgtttttcttttaagcaagagaataaaaaatgtactctagttctattcattctcaggaattgacttctaaaggacagtcccattgctagatggaataattcctctgggaatcaagaagtgctctactacttaaagtttaaatggtaaacattaactttaatggactctcaagaatttccctattgattagaatcactttgccaaattaaaaaaaaagtgtgctctaattttcaataattattacacaaaaacgacagagttgccagaattccttttgtttagttttgtttcctattactcttaatctatattcctgtttaagacgtaatttttggattatgctactgatgggggaaggaatttgatttctgtggtggtgctgagcttcaacattatctccattgagttgagtggttggagtaaagtagagatgtatcaactttcaaacaaatgggacctggagaaaggctgctttcaaacagcaatgaaattcttcagcttttaagaagcataggaggcatattcatacttcttctcaacatttagttaaaatggaaatcctatcctcaacacaccaaatatgtataatttgtgatgctctgtctacatctttggtgtccagtatggtagtcatgaatcatatgtggctatttaaattcaaaatacagttaattaaaattaagaaatttgacattcagtttctcattctcactagctacatttcaagtgctcaatagtcttattataaggctagtggttaccgtattaaacattacagtcctagaacatttccttcattggagaaagttctattggacagtactggtaaagtagtttttggctattggatattactaggttagtagtttatgaaactaaaaagttcaggtttctgtgtcccaaaaccctagggaatctagcaaatttcaatttaaacattatgtaattggttctccattgcttccctgagcccaggactaaaaaatctttggcagctttcctttcctagttgagattatagccaagaatggcctgctaaaatcttaatacaaatatgtaactctaaactctgaagagagactctgggtgaagaaatttctgaatggcttagccttttattttgttttggattattttgaagtgagatcataacttgtagaatgaaatctttgagaacctaccatttaactgatttttagcagaaaaaaatgctaagagaaattatgcatataattcacagattcatacatatataaaaataaaatatcacatgggctgcagtggcagaaaataaccagaattgttaattatccttctaacttgatgaactttttgctcagtgccttttcttttttactaaaagttaaaatagaaccaaaatgaattgtttctttttgaaaagctggccgaaggtctaaaaagtaacaaatactaattgttctaagctgctttacggtgaatttcctttcatggtttaagggcttcaattcttatatccacatcattttgatttatatttattgaaacaggcaatgactttgcgtctgtgtatggctgtgttaacacaggtgtaaattgaaagtccacagatgtagtttgggcccttaataaataggctcggtgattatgacatttgttcctttctccacattcacctctcaaatccagcagacatacttaaagggggaataaatctcagctcacaaactcaactgtttaagggaaaaaaaaatcaaaccaaaacaaaccttcattttcaataaatcagctgttaatctgaatgagcaagttgtagggaaaaccttaatctccgtgactcctagggtttcccaggaaccttcaaagaattgccagtgtcccaccacctgaaaggatggcaaggtcccagtgtatgcaagggcatgaggtcactactgctccaaggctaagcccactgctggtggtggggtcacttcagggccagggtgctctctaggaccaagaggctgaccaaagttagttgcctggaccgttgtgtgtaaactgctgaactcacaggcttgttattttgtgctgatgctctgtttaacattcagagtgctattgcttgtttgctttcatttagatcagtttttaagctttaaaaatagaaaatagcgtataaaaggagcttttttgaccaaagaagatatacagatggcaaatacacatatgaaaaatgttctatatcatatgtcataaagggaaatgcaaattaaaataagataccactacacacccattagaatggccaaaatctggaacactgacaacaccaaatgctgatgaggctgtacagtagaaggaatgctcattcattgccagtgggaatgcaaaatggtacagccactttggaagacagtttggcagtgtcttgaaaaccaaacatgctcttaccatatgatacagcaattgcacttcttggtatttactcaacggagttaaaaacacaaaaccctgatatataattagatgtacacatatatatgcacatcatagcagctttattcacaattgccaaaacttggaaacaaccaggatatttcatcagtagatgaatgaataaataaactgtgataaactatgctacatccagacaagggaatattatttagcattaaatgagctagcaaatgatgaaaagacatgaaggaaacttaaatgcatattactcagtgaaaggtcagtctacaaaggctacatgctttatgattccaactatatgactttctggaaaaggcaaaactacggagatgagtagttacctggggttggggggaaggagagatgaataggcagggcacagaggatgttttgggtagggaaaattttctgtgtaatagcataatgatggatgcatgccatcatacatttgtccaaacccagagaaggtaaacaccacgtgtgagccccaatggaaactatgtactttgaatgaaaatgatgtgtcaatgcagatttatctactgtagcaaatgaaccatttgggtgccggatgttgatattggaagagactgtgcatgggtggggagatatggtagaactctgtaccttcttctcaatttttctatgaacataaaacttctcttaaaaattaagtctactgggcgtagtggcacctgtctgtagtcccagctacttgggaggctgagacaggaagattgcttgagcccaggagttccaggctgtagtgagctatcattatgcctgtgcatagccactgcactccagcctgggcaacaatgtgagactccatctctaaaaaaaaaaataaataaaggttacccctggcacattgcctatggtgtagccgtgctccacaggagcaatcaaaaacaaaaataatgaaagtctttttaaaaatgactttctgatgtatttttacacaagcacaaagttttggcaaactcgtgttaatattccttcattacccattggttggcacggattatgctttgcctgtgtaaattacagcacggagttgatgcctctttaaggcaaggggctctgccctatgggtttagtgctagtcattggctgtaggtttcactgcgggatcctgtggctcctgggtgaggcagctcttactcagccaagggaagttctacgcagaagggggcagccatgagccatcagaaaccaacgggcacagaaactgggccattggggtacctgcttggtagagggactgtggttggggcaccacccagagtacagcagctactataatatataagatctattatttagctaaaaagaatagagaagttattttcaagaaaaaatttaatttgaaagttttgtgtgtagtatattggccatttaaattttgtttcactgcatttaagataaactctatattgtgttttcagttcctagagccatacagatacttgaaaccacaactgatttgatttgaagtgtgatatatacaaatacatatatacgtatatgtgaatatgtgtgtctagagacagaaaccaaattcttgaatataacaggtgttttctaatatttagcaccagcacaactgaggccacctctggttaaaggaatcaacagcacaacaatccatcttaggtggtttccacctgaagaactgaatggaccctctcctatatatcagctggaaaggagagagtcatctctaccagctctgatgaccacgatgatgaaaggaatccgtttcataggaaatgggtattgtaaatttcccagctccactcacccagtcaatacagacttcactggtaagtgtgtttgacattgctttatttaggagacacgaagctccaaaatgttttctatattttcatatccctttacaatgaatttttattatacctacttagagaaatactaattcagccctttgatagcttttgcctgattgtttcagcatgtccatctttttagaattctggggaaaaaagtcaggtaagtgaaggaaaggaaaaataaaagatgaagatgaagaagcagccttattggatcaaagtatgtgctttgtatttgtctttttgtgaagtatgtgccaggacatgtttcttgaaatattattcactgtgttctctgagcaaatgagtttgcaaaatgccctcatgctattggagattctcagtatgcaccccgttactgaaactccaaaaagcattgtaagaaagctattcaactttgcttagctaatcatgcctaacagatatttgatgtaatgttttctttttctttctcttgctgtttccttcttctttttttcactgtgacaacttaatatctcatgttctatgaagaacattgtggggaaaactaatcccagggaaaagataacttctctaagccaggactatggtaaagcaagtgaggctcttgtttcggtcacaaaatttaaaggcactaaaaaactcagtgttaatgtaaattttaatgcaatatttttaaaaatgaaaatcaatgtgaaagcactataaaaatattatcaaaagcttaaataaagacagattgaactctgtaccagcacaatcctgcctcactggccttaccctcctcctggccttactagtaccgcaatattttggaagtcccatgacctctgtgacttacagcttctaatagcatgatttcaatatagctgtaaaaaaactctacttatggtacaccatttttccaatttttaaaaaaatttacaaagtataagatatatattattatgtaaactcataaagatgttcatttaatcatccatgagaaagtcattttggagcaaatagctagtctttaaaatattgcatatgtgaagacaatgaaatggaattcgagctataaaaatttgtattgttttatttttacttaaaatagtaaatagtttgcttttcattgagactggctgctgatgcaccttggtaatgaatcatgattatattctaactgagatatattgagattaatgcatgattaactactctctcagtacatcaaaatcattgcagagtattagaaattgaaccattgagctaaaaatgctcaacttctgctttatattcttaaaatggcaaaaaagaaaagaaaaaaaaggtaaggaaaaggaatacatgaataatagtaaaactcttttctcaaatgaaaatggaaactacctccctgatccaatatttggcttgagatgtgtttcttccaagaaatagcatccgtttccattcagctgggcatagctgctgcaaggatgtcagcttggatttgcaggctagccagcagacagatttttgatgggatcacctactgttgttgcagtgaaagatagaatggcccgtccaccgttaataaatttggtcatcctcgctatctcccttgctggccttatactctgaggtgcaagggctaggggcagatgcagtgtctgggaagttttccaaattcctctttaaaaaagttaggctgtaaacactggcctcactaagcaggatccttctgtctataacaaagcctccagctgcacagaaaatatgcttggagtacacaccatttgaaggacaaggcagggagatcacaattttggcttgaactactccctggagctttggtgattcctggagaatgagaagttcttctgtgttcaggcatgttctgggacattgctgatgccctttttagtggtagcttggctttacttttaagacccctttaacttttaatataaccatgtatatactaagttattggtttgatcctttggctgacttgccaggtttggctgaatgattttattgagttgtaccgaagcctaactaaatgtacccaattaatgagctaggacaggttttcaaaaccaactcaataactttctgtaaacttgcatctttcctaaatagagaggtaagcatataattagcatcttacattattcttactgatatattatcctatttaatccctctgcaaccctataaagtagctctttttaccctcgtagtacaggaggaaaagaggctccagtgagtgacttgcccattgtgccacagctattgaatttcagggtggaaacgtgaattggagccttccaaatttaaaggcaaggtctctgctacagggtggaaaggaacttttgtagactgttctttggaagtgatagaataggaagtatacaaaagtaagaaagagggataggaggtgaaataattatcacccaaatattccttatctgacactgctaaactttttggatttgtctttcagttagtttcagctcacaaacagcaagtagtgttggcattatttattcatttatttgtatccccaaagacatgtaggcatcaggtttttttttaatagcaattaaacccagagtgttactagaagctagatgtttaaaatataaataacattatgtgaaatgggctgaagtgttatgcgttaaaacagtgctttcaactcacattcctttatatttcattcagtttttatattctgaggcaaatttaatgagcaaatccttgaaacctctaatatgatgaattacattttaaaagttaataactttaagataaactaagatgtcctttgttttgaattattcaattcaaaatctcaaacttcaactaaaatgacttctgaatagaaatatcaattagtactcaaatacaaatataaggttgatgtacataattatacatattttatatatgaaaagataagttagattgtacccatcaatgacaggaattataaacgcattcataacacatttcatggccatgaacattatgttgcaagtctcagtaagaaatatctcattattgtagtacaagaaagggatctcttacacaacttatgcctctttcatatttgctttaaatatttttatcttacacaatagaaagagaataattcaagcatatgaatatatgtcctaaaatgttgtttaatattgtaaattaccaagcttaatactgtaaataaaccctgtcaatatctacctttgggcagaataaagaaccagataaagctattttgggacctatttttgcttccttttcttttctgatacaagtgttcttttaaaaaatctaatcttcaggaagaatgtattatcagtcatttacatcatagtttaaatttaaaataattaactctctgtatattattatgaggacttcgaagaagattaactgataaattactttcaaatccaggccccattatttattagctaaatgtaattagacaactcatttaatcattttttgtgcttctgtttccttttctttaaaattaacataattccactgacagtattggtatctagcaggtaggtgaggatttaaagtagatagcccacctaatgaactttgcacagtgcctaccacacagattatttagtactcattaaacattagctattagttattattcatttaataaatatttattaagtgcctactatgagacaggagctttcctaagtgagagtattctgcagttataaaatcagcattctattaatttatttgctgttacacatgcaaaatatgtttgctcaaatgttatatctagggcatgagtaatatgcaatattccatattaaaatgtgatacttaattttgctattgaaaatagtaaaattaattgacttagtggtgaggacttgggcaaactacttttctgagtgtctaatcttgctcatctattaaattgaggattttgttgcatgatcaatgttctaacctctaaaattccaattctgtgaacatagaatgtttaggaggccccacaatccaaaatacaggctgtaatcatggcatctgtgagttaaaaaaacacctagagtttaaaataaattgttttctataatattttgtttattaatacaatttaagattgatacaaatttactgcttttctctaataatttaagaaatttagtgatatgggcagagttcaacataaaatagatattcaattattgggtcatatcagatgttataaaaaaagcagaaaattaaaatagtttcgtgatcttgtaattgggcaatgatataaacaatcatggtgaaacagtgccccagttacatggggttaaaaatactttcttcttccaacacagaaatagcaaatagagcctcccctcccatatgcaactagaaggggatatcattgtgcctttggagagaaaaaaaaatcatgctcgtttttttcaggaatgcagagtaaatctacttgatttatacaaagaatttagttctttccttgtaatgctagtaatccaagtggaacctggtaaaaacagcaagtaaaatactgctcagattggcattccaaaggtgaccctctttctccttgtcacttattttttcctattagcgaaaacaggtccatgatcatttgggggaaggtttgactattgtagtatccagatgccaatcacaccagccttttaaactgcctttactggtgaccctgcccagaaatcaggaactgcctttggggagatctttgtagcaaaccactggggagatgagcacacacatgcacctggatataattcccttttatttgtcttcacgagaaatgtgattactgatgttgaatatcttgcagatgagaactctatacagtttcttcataataatgatgttcaaggacactaaatgattgtcatacatttttgtatcatagtattcaccttcccaaaaatggttgaactaaaatgctttagaatacgaaatgcaattaattaccaagggatgaaaaaagaaatgcaaccaccaaaaatcaatatgtttaagagcatattctttatttcttttactccataatatttatgccttattgttattagtcttcttatttttagtgaattgggacatttaagcacttcattaaaagaaagctgattataagcatttatagtgaaggtgcaagtagggcaaacttcttcagatagactaattagtaaaagcatattaattctgaccttcaacacccttggtgtcccactatttgttttccttggagtgggagcaagtattttgacagaaagcgcttgaaaaaaataaaaaacaaaacaactaaacaaaaccccagttcttttcaagacagatttaaatcacaaattttacctaacctttgatgttagatttcagccctagttattgaaaaacaaatataataatctactatgtgtcctagaagtttaatgaacaggcagtaattatactaaaaaagtaaaggaaagagtaagaacatggtatgtggcagcaaagtaaaggagaaataattctcaggcagtgacaaaactctgctgtgttttctgattatgaaacaatcagaagagatgagaatggttgagttaatcagtttggactgaggacaaggatcaaaatgcatatcttcttagaataacagaagtcacactgactcatgataactagagatatggagatgtaaatgtcaagactgtttattttttattatatttagtagagaggtataagtaagttctcaggaaatgccttcaggtggcattgatggcactgcgagatgggagaggaccattatttccccattcatcaactacatcataagaccaatttaagaatgcatgtgttttaacccttgccttttaaaagtgacttattttgaagtacattcctgtaagtctcccttttttttgaaatattaatgttaggtaactggtaagctgagccaacactgaaaacaaactgtttttgttagctgttagcagtattttagttaacttaaagcatctgtttttgtccatcactgttaaaatttttcaaaatgcattgtcacctgatatataaaccacacgtgtgttcctatatactcatcccacatgcataaacatatgttttccagaaggtctctgggttttccgcaaccactcaatgggttctccttgcccactgcctagacagagccagtttatcaagacaggggaattgcaatagagaaagagtttaattcacatagagcctgctgtatgggaaacttgagttttattattactgaaatcagtctcttggagagtttggggatcagagtttttaagagtaatttggctggtaaggggttgggaagtgggagtgctgattggttgggtcggacatgaaatcctagggagtcaaagctgtcctcttgtggtgagtcagttcctgggtgaggaccacaagatcagatgagccagtttatcaatctgggtggtgatagctatttcatgagttaagggactgcaaaatatctcaaacactgatcttaaattttccaacagtgatgttatccccaggagcaatttggggaggttcggaatcttgcagctggaggctgcacggcttctaaaccatcattccttatcttgtagcaaatttgttagtcatacaaaggcagacaggtccccaggcaagaagggggtctatttagggaaaaggctgttaccatctttgtttcaaaactaaattgtaaactaaattttttcccaaggttaggtcaacctttgcccagcagtgaacaaggacatattagagtttataagtaagatagagttatttaggccaggtctctttcactgtcataattttcttagttataatttttgcaaagtcattttcatttctatatagtctcaaatatacctgctcaaattgtccagtgtcttttctgccagtatgttggcattttggaatcttttcaaagacttcattgcttaaaaaaaatgctgttgcttaatgatattttgtatcaatataacacattaattttaatttccccttcattcagcttaaatgggttggaaaaggaactttgagcagaaaaagaatcataattggtcagcaatggtagtgaaactagcacctttgaagatgattgatttttgatttagtaagatgaattattttgtgtatgttttcttgaaaaaaattagttaaaacatttaaaaatgtatagttatagttattttataccagttacagcactcttgaagtgtatagattaagttcctttctattcagatagagaggaatctgggaacatcattgtcaaaatgccatctctttcaaaacttggttccagtgctctaaagaaatgttttagaagattatgcactaatgttactggcggcaaattcatatagatctgtagccacctcaatttttgcattctcagaagaaagaatttgattgaggggacataaggcatattaagagaccaagacaaattttagagcaagagtgaaaatttatttaaaaattttagagcaggaatgaaaggaaataaagtatacttggaagagggccaagtgggtgacttgagagatgatttgacctttacttggggttttatataatggcatgcttccgaggtcttgcgtcccttctcccctgattcttcccttggggtgggctgtccacgtgtacagtagtctgccagcaattgggagaagttgaatgtccagtgtgtttactgaagttataggcatgctcacttaaggcatgtttccttgccagttaagtgttcccagaaggtcatataccggttaagcgccaacattttgcctcttagtgcgcatgcttgagcccactcacccatctcctgagatctcattgggaagctgctgatcacccgtctcaggtgtttctatctatagggagactgcctttccctggcactggctgtgactgattcttattattttagagagatagtgtaacaattatcacctgacggttgcctgacatttctggtggggcgttgtggggggcggtgcttctctgaccctgcccatagtctaactgccaactgtaacactaacagtttcattgaagtgggggaaatgttaagtaataatatgaaaaccatatttaaggtatatatatataaggaggctcacaaacatagccataggccgtttgtttggagctttgaaaagggaggctcagttccttgactgatgagcagtttccatttggaaattctttgactttagtgcaacttcaaaataaaggcatgagacagaaggagagaggaagaaaccctcaagccatctaaagtcatctctggcaatggtggccatatcattttcacaaaaaaggggcatccttggggaatatcataaaggaagaataaggacttaagggaaatgtgtgggaatgattgactgatcctccctccagcagaaaattaaaaatcaatgtagatgcatttttctcagcttcttcccttcatttttttcctctcctgaaacctgttcctccttccgtgtgtaccatctacagtgaatatcactattgccttaggcggaaaccttggaactctccttgaattggcacttgaactattcactcatttcctcccattctattaatgattcctcctctggccgttcttcctcggatacatctcttggaactacctgctggtcctacgctactgcctagtccagacctatgttgtgggcttctctgccaacagtttcaatcttctccaggctgttcttcaaacgaattatttttattggcattctcttgtgtaaaaccttttaatggtttcccagcgagagatgcccttcacaaacccttttctgcttacctgctttctacctatatacctcctcatctctcccaccaaggactggtatactctctagctctagaccattttttagtcccagtgcttgaatatagcacactctctcagatgcccatctctttgaacatattgatacctttgccgggtatgccctcatctatttgcaagtacttcgctttcctttcacctggctaattgctactcatcatgaaagggttagcttagctgttcccctaaataaacttccagcaaccccagcctcctcccatgccaaatctgggttgaggacctctcttatgtactactatagaaaccaacaattactctattttagctcttaccgcattctattaagacaggttgttcagggagctaagctatgaggacgcaaaggcataacgatgatacaatggactttggggactcaggggaaagtgtgggatggggtgagggataaaaaaaactacacattgggtacagtgtacactgttcaggtgatgtgtgtaccaaaatctcagaaatcaacactaaagaacgtattcatataaccaaatactgcctgttcccaaaaacacctgttgaaaaaaaaaaaaaactggttgtttgcttatctatgtttcatgtagactgaaattatgactatctttttcatgcttaacacatttgtgtcttgcacggcataagacatttaccagatactcaataaatatttattaactaaatgagtgatagaaaagagggaaatccaaaagatggatcacttagctgtaagaattatttaatggcaaaattcattatgcttttgaatatagttcacatttttaaatccacgtttttgaaagtattgatggtttagagtgataactcaatttgtttagtctctattggccttagatgtgtaagaaaatacattttaaactgtatagtaccagagacaaaaagaaatttcttgttaatggtcctcagttgctggcaaagttacttgtacaccagttgttatagctagagtgttatatcagaaattgttttctgccccaccatagctatcacattgtgttgctgaaaactaggtggttgcacatctcttagatacatgatctccttaggcttattaaattttgaggttaatgaatattttgacacttttacctatacatatcattagggcttattgcaataggtttaagatgacagtcataataaacatatacagtacaataaaaagcacttttaatcttgaaagtgctttaaaaacaacagtgatcaatgctatggatggattaacagcatcatgctgattgaattctatttcaaggacaatggaggtattgatgttggcagtctagttcagaaagtggcaatggctgtagtaaatggtgcaggttctggagtcagactccccaggtttcaaatctggctccccaacatgctggtgtgcgactttgcacaagtcattcccccagtgtgaaactcagtttcttcatctgttaaatggcttattgtaaggtttcaatgcaatcactgtaaaggattagtacacagtgtcttagtattgtgtatgcatttgtgaccagcattctgtaattctggacttcaattatgtgcctttccattgcatacatatattttatgtccctaagtcacataaatcttgttgatacttctttatgacctctctctactacacggtactctgatcattcactttattttactcattctgtgaacctctgacctgttttttgttgtcattgttacctttcttcttccactagaagcatacatgttctgcatctcatttctccacatctatttaaacagccaactttaaatgttatgtgtacttataaacctaactctattattccccctgtcttcataatcagtcttctcgaaaactaagactctctatgtgtcattttctcatggatcaattactcctcaatctactgtcatttggattcttttcttccacttctttattgtaaatactttcttctagattatcaatagttttcaagtcagagaactttccttaatcctcaccctatgtgccaataaataatattggtgccattttttccttttaaaaaataagaagaaactaaatatttctcactaggtttctccttctattttccctaaactgtgtttcaagctttgatattgctttctacatccacctttaaatggaagagttcaatcactcattcggttcgtatgcagtttttccttatttcactccactagctgatgttatgattgctgtcgtaaaaaggatactgagcaacacaagaatgattcctaaccttagggagcttaaagtcttgcagtgaaatcatgcatcaaacatgtaattaagtaattacaagtgacttctgtctccagctatgaagcatatcaaaaaatcctcctgctgagaaaagaaatagaagctggaaaaaatttctcaaaaatatggttaaagacataagtgagtaacaaaggcttctaggacttgtgggatcaagatcctagatataagaaaaaccatgtaggtgagccttttaaattatctttgtttttccttctgttttgtttgttaattcctctattgcatagtcttagggaaaaaaaaaagacaggcaaaaaattagagtctaggtggggtcctggtatacatgccaggttttcaattgaaatcctagaagagcaaatcattaataggctcttcttcctcagataaagcctcaattattcttaactactaattatactgagataaaagttatttttttaccaaaaatatttagatatttgctgaaagatcacatcaaccagagtcccagagtgtgcaattttttcctatacaatgtcgggcattcaatcaaatattaacaggcataccagaaaatagggccaaataaccaaaagataagataaataaaataaaaaatagaaacatatcctcaagtaattcagatatatggaaatatgtatttgcatacacacataggcatatacacacatatacatgtagatatatatgcatatatccagacacagactttaaaataactataattaatattatcaataaaatcaatgaaaatgttcagaatttaagtagcaaatgggaatatattagaataggaattttagagcggagtaacagctgaagttagcaactcagtagataaaataccaattccatccctgataaagtaaatagccttgttcttaatatcgtatgcaacaatgtaagttgggaacaaaatatatatgaaacacctatttgtagccaatatatagcaacagtgcagagctattatgcttaagtgaagaaaagcaaatgaactgagttgcacacacctggaattattgagctcaagcagagacattagtatatctggtaaaggaataaaaactggaattcagggctacaaaagtagatttggagggtaggttcccagagagaagattgatgctgaaaaataattcaaaaattctgtgtaacaattcttttttgggtgcttggccaacatttagaataatcctatgagaaacatagtagagaagatctgcttggtagttggagctaagtagagatttcacaggcaacatagagctaaggatgcacacatggagtttggacttaaccacagtagagaaaccttggtgaatactctgagctttcactcgactctccaaaagtccgtcctttatgagtaaattcccatgctttaggaataagggctattctttaggaacattgagataattgaaacagattcaccctagtgaagcctaaagccaaggctgagtaaggtcgaggtaatctggtaattttacttcccgtcaaaacagaattttgtattcattagtaaaaggtaaaataatccagaggttttactatgcgtcatccatgaagtgaccaataatgaaatgttaatagtcgatagaggcagacaaagacttcaaaataacttcagttaatgttaagagaaaataaaggacaaggtggacagaaaggatgataagataaaaaatatttcaatgcaaaattgaaatctgtacagtaattaataggaaaaaatggtatgtaaagtaaaatacctgaaatgaagagaatattgataagttttgccaatgaaacattgcagaaggcaagattagagaactcaacggtcaattgtaattgtccaaactgaagcatatcgagaaggaaatgaaaacatgaaaaaaagaacaatgaggtatttgaggacccagaaggaaagagtgaaagaatgagacaatagtaatattgtagaatagccaaatattatcaaatatgaaaaataagttcacacatagtttaacaaagtttagcaaaccataaggagggcaaatataaggaaagccatatccaggtatattacagtcaaattgcttaaaataaaagacaaagaaaaaccttcaaaagcacctggggagggtggggagacttattaccttcagtggagcaaaaataagaatgatgtctgagttttcaacaacaacaataaatgaatgccagaatataatggaatgatactttttaaatgctaaaattatttttttaacaataataacaacaaaagaaaactaccagtcaagatttctgtacccaggaaacatatccatcaaaaatgataaaataaaatatttttcttaacaaaagagttgaaaaaagttatcatcaaaagactggcattataaaaatcataaagtgtattaggacataggaaaagatcccaaaaggaagcacagagctgcaggaaagagtgcaaacctctagaaatggtaactaggtgtgtaaataaaaagtaatatttatgataaaaggcataaaaatcatactttgaagttgataacatgtaagaaaaaatgtatgacatcaattattttgtcacaaatgatgacggggtctatatggagctaaactgtggtaaaattcctaaaaagttatggaagttgaagaattaataatatgaagtaggccatagtagatcaaggattcagattatgatgccaaaggtaacaaccaaaagaatgatttagaaaattaatgtaaggaaacactaaatgttaaataaacacaggttaagctgataaaggagtttgagggtggcaagaagaagccagaaacaaagagcaaatgtggggaataaaaggacaaataccactgtggtgaacataaactcaactatatcagtagttgcattaaatctaaatagtctacccaaataagcataaaagttctcagattgatttaaaaaataaaaatatatgttgtttattcttataaacatactttaaatataaagacaaaattcgaaaacaaagaaagagataagatgtattgatatatagatagattttaagacaataaatgttagtagacaaaatggaggacatttcataatgacaaaaagatcaattcaatagagggacatataatcctaaatttaggtgctacttatagtttcagatatgtatataaaactgaagttgacagaaataaacagagaataaatatatcctcatagttgaagatataaatccccatctaatattttgacaggaaaagtacacaaaatattagtataactatcaaagatttgaaaatgaataaacaattacatctgtatataaaacatgtgacattttataagtgttgtcatatgtagaacatcacttccaacaactatataatatgcatttttgaggaacacataggacattttccaaatagttaatatcctgggctatagaaatcgcataatttttttttttaagagacgaggtcttactgtgttgctcaggctggtcttgaacccctgggctcaagcagtcttcccacttcagtctcccaaagtgttaggattacagatgtgatgagccactgcattcagcttgatctcataatatttcaagttctctgacaactgtgagattaaactagaactccaaatctaaaacataatccgattggaaaatatccctggctcaaaaagaaattatggaaattaaaaattatttttatctaatgataataatgccttaatacatataaaaacattgtaggatggacaatatcaggaatctgatattgctttatagctttaaatgcatatattagaaaaagggaatagttaacaatcaattagcttcccactcaagaagaaaccaggaaattaaagcagcatatgacacccaaaaaatatttgaataaaagaaattataaaaataagagaaatcaatgatatagcaaacagaaatgtaatggagaaaataagaccaagaattgattctagaaaatttggggaaaaatttctttgcaagtgatcaaggaaaggagaaagtacagattactactctcagggatgcaaagagccattactagaaatcttacagacattaaaaaaaataataatgtattaagaacagcactacgctaaaaccttgacaatacaggcaaaatacagagatcctttgcatgggagaaaaatctccaaatttaaactgacacaagaagatctagaaaatctatgtggtcctagatgtgttttaaaaatgaaatctatagttaagtcttttacataaagaaaaccccagggaaggtggcccgattggtggatttcatcaaacaattacagtagaaataatagcaatcctacaaaaaaactcttacagaaaatagaaaattgcaatggtttctatctcattttatgaggtcagaagaacttatacactaaaatctgacaaagaaattaacataaaggaaaacacaggtcaataataatcacaaaagtagattctaatattctctgtgtgtgtgtgtgtgtgtgtgtgtgtgtgtgtgtacataaataaaatgttatatcatgaccatgcaggttttattccagtagtgtgtaatcttttcaaaatgtatgtgattcaacacattaacatagtaaaaatgaaacattctaaattatcaccacagatttaacaaatgcatttaataaaatataataactattcataacaattctcagcaaactagtaatgaaagaacacatcctaataaattgtttttgtaaaagacctctaatagtaaaatatcaagtgctttttcccagaggtcaggtacaggacaaggaaattcactatcaccacttttatttaatgttgtactggaagtatagtactagccagagcaatatagcaataaaataaataagtattaggtatgtcaaagaagaagtaaaccatctttatttgtagatgtcattatttttattgatgtcaaaataatatataaactattcagtttactcagtaaacttagaaaagtgtcgaataaaggtcaatgtacagaaatcaaatgtttctattgaatagcaaaaaacaagtagaaaatgaaatgtttaaaagtaccatgcttactagaactaacacacataaatgacttagaaacaagtctgctaaaaggtaatgtaggacctccactctgaaaactacaaaaaattactgtgagaaattaaagaccaaataaatggaaagttacgccatgttcatggatctaaacacttaatattgttaaatagcaagtcttcctagtttgatctgtagaatccatatagtccctctcaaaatcccaggatttctgtaaaaatttacaagctaattttaatatgcacatgagagaggaaagtacttagagtagccaaggcaatactaaaaaagggcaaagtaggaaggcttatgtatcaagactaactataagactgcagtaggtaagcatgtatagtataggcaaaagaacagataagtatagtaataacatattgccacataaataccccaaataaatacatatatatgcagggcacagtggctcacacctgtaattccagcactttgagaggccaaggcaagagtattgcttgtgctcaggagttcaagactagcctgggtgacatagtgagacctcatctctacaaaaagctgaaaaattagctgggcatggtgaggcacctgtagtcccagttactcaggaggctgaggtaagagaatctcttgaacccaagagttcaaggctgcggtgagccttgattgcaccactgcactccagcctgggtgacagagcaagatcctgtctctaaaaaataataataatacatacatacatatgtgctctaaaaagcacatgcaaagttgttcatagcaactttatttctaataatcaaaaactggtaacaatccaaatttctatcaacagtagaatggataataaattataataaatttattcagtggactgcatatagaaataaaaatgagccaactattgcttcagagaacaatgtgggtgaatcttataacctgttagtgagtaaaagaagctagaatctaaagagtctagtattctatttatataaatttcttctttttcattttaacatttattttaggtataatgggtacaacatgcgggtttgttacttggctatattgcatgacgctaacgtttgggctatgggttccattacgcaagtagtgagcgtggtatccaataggtagtttttccaattacagtcccctccctcccttccagtgtctgttgttctcatgtttatgtccatgtgtgctcaatgtttagctctcacatataaatgaatatgtagtatttggttattgttccagcattaattcacttagaattatgaactccaactgcatccatgttgctgtaaaggaaatgattttgttcttttttgtgattgggtagtattccatggtgtatatgtaccacattttctttatccagtccatcattgatgggcacctagattgattctgtgtctttgctattgtgattagtgtagcaatgaacatatgagtgcatgcgtctttttggtagaatgatttatttttctttgggtataacaggattgctgtgtcaaatggtagctctgttttaagttctttgagaaatctccagactgctttccacagtggctgaactaatttacatttccaccaatcgtgcataagcattctctcttttccacagccttaccagcatctgctgttttttgactttttaataataaacattctgactagtgtgagatggtatctcattgttgttttgatttccatttctctgacaattattgatgctgcacattttttcatgtttgttggttgcttgtatgtcatcttctgtgaagtgtatgtttggctgggcgcggtggctcacacctgtaatccagcactttgggaggccgaggtgggtggatcacgaggtcaagagatcgagaccatcctggtcaacatggtgaaaccctgtctctactaaaaatacaaaaattagctgggcatggtggtgtgtgcctgtaatcccagctactcaggaggctgaggcaggagaatcacttgaacccaggaggcaggggttgcagtgagccaagatggcaccactgcactccagcctggcaacagagcaaaactccgtctcaaaaaaaaaaaaaagagatagaagtatgtgttcatgttctttcccattttttaaatggagttgtttttcttttgttgatttgtttaagttccttataggttctgcatattagaactttgtcagatgcataatttgtatattctgtaggctgtctgtttactctgtggatagtttcttttggtgtgtgtgcagagacactttagtttaattaggtctcagttgtccatttctaaagctgcaaagtgaaatcagtggtgacagaaatcagtagatggggtaataactgaaaggaagcaaaaagaagccctctgagattctggaattattttataaattagtctgagaggagtttataagtgtagatttattttgtaaatgtccatcaaaatataccttgataattagtgcactttatttttgttatactttactttgaaaagttactgaataaatgtttcaagcctgcaaagtccaaaaataagatgtgaaaaaatactgtaacataacagaagcactcaacccagtctagaggattagtgaagacctctccgaggatgaggcaagttgagttagctaggccaaaaaaaaaaaaaaaaagaaaaaaaaaagaaagaaagaaagaaaaagaaagaaggaaagtaaaggagtccaggtagagaaagtatcatgtatcaatgtcttaatgtgggagatgacatgtacataaataaacaaattagtaagcaagaaaaacttggaaattctaatataaattagattcttgccagaagggtgcatggtgaggctgaaataaaaaaggggccagatcatgcaagggccatcacattgaaaattttgaacgtaattttattcatctttataagaccactgtggaggttacagcctgataccaagaatgtttttaagaagggcatgctgatattttcactgatattgtacatgtaccattcatagattgactcactaaaagttgcaattttatttaatcatctaataagattatttatagaatgtctgcaaaatgttagaagatcttccttataagaattagcatagctgaatggtttaaaaaaaaatgaaattctgaatcccagcatggatctattgcattcttgcaattgtccaaggcaaaaggttctgcttgcctgcttcataaacaaaatcaattaaccgagactgcagcattgcagtaaaaagtttaatttaagccaagccagccaagtggaagaactggagttatcactcaaatcagtctctctgaagtcttgaaggttaggatttttatggataatttagtgggcagaggggctagggaatgggtgctgctgataagttgaagatgaaatcataagagcatggaaaatggtcctcctgtattaagtctgtctctgggtggggcaacaggatgggttgagtcatgagtcattagtccaggtgggatcagtttgaaaaacatctcaaaaaagcaatcttgggttttacaatagtgatgttatctataggagcaattggggaagtcaccaatcttgtgacctctgaccacattattcctgaacagtaagcaattataaaaattacacctacattttagcagcattcaggcccctcccgtaatcctattcttgtggcctttcattagtcttatgaaggtggtttttagtctctgagaagggaggaggttagttttagggagggatgatcatctatgatcatctttgctttcaagttaaactatgaactaaatttctcccagtgtccaggaatggccaaagacagcttgaaggttagaagcaagatggagtcaactatgtcagatttctcttactgtcgtaattttgtaaaatcagtttcatcctaatctctggagaagtacctagaaatttgcatttggataagatatacagatctacactattaaagacagagctatcttacccacccccaccccagctatttgtctaagggaaatgaaacaatttgtacatacaaaaggctggcacacacatacgcattgcgcctacattcacaagagccagaaactggaaacaactcaaatatccatcagtaggtgaattgattaataaaatgtggtatatgtatgtgatgaaatactagtaagcaatacaaaggaaagagcagaagaacacttaatcgtaattccacttatataaaattcttaataataattaatgtatagtgacaaaaaggagatcagcagttgcctaggcctgaggaggagggggtgatggaaatgctgtgtaacaatcaaggtagtggttttacaagtgtgtacatctgtcaaaacatatcgaactgaaccatttaaacagatgtgcttcagtatatatgtaaatttttatctcactaaaattaataaaatattctccaagtgattcttgcaacattcaagtatgggaaccattgatttacactgtaatgaacaagttgctttaactttgtttggaaaccaaacaattttaatattattttaccatttaaattctgagctctttcagatagaaacttaagcagtgtgtatactgcttatcactccaaatttcacctgaaacaaattggtatatactgtttgtcataaaaataagaaaatgactttcattaaattatgctgacaatgagaatcttgtacaatttcaatgaaataactttttttaatgaaatagggtttcttttgatctcattcacattcagaagggaatttttgtaaatagaaaggactatattttattttatcctaagaaggaatttagtcagtaaaaatatgaaatagacacttgagtatacagttgaccagttattgccttgaagctactgcacctctgtaatgtatttttcatagcttatataatccgtgttaatatgctacattattaagttcaactgtgagaaatatagttgcttgaaaacagatttcttctgcatacttataaattcagtagttggaaaaaaattaaagaaatataattaaagattgcaaaatcaatttgaccctcacttaaaatgtgttgagtggaggcagcaagcagcagcctacatctgatgctgttctctccttgtttacttcacaaaactgtgcaaattagaactttaatttacagagctgttaaagcctcattaaaaactttcagcaagtatcctattttgagggtttttttccccttatatctaatatgcagcattatctctgttttgtgggcatgtatgaggcaatatctataggcatattaatgtaaactgcatatatgaaatgaaagtttttcacatggaaaggacactagtggtgtctgtcaattgcttcccaaagtgattaatttctccatttacttggtgtttattggcatctactaacactggatctctgttggatcataggaatataattgggctccagtgaaatgggagaattccctgacaccctgttgcaggatatgtgacagaggtgtggcttgtctgcttgaccgccttgcactcaaactccttgcaggagagggagcatgcagatgggcaggtgtgggagccagggcaagaacttttgggctccagtcccatggtagtatctaggggtgggtgcttgtgactcccaaagccccagtgggtgtgttacaatgcccttttagctgtgccatccacatatggcttaagtgttaaccagctcagtgctttcttggtacctgggttcttgtccggtgtccaagaagaatcaggttacatggataaactgaaggatggtaaatgtgggggattttattgctggatggaggtggctctcagtggaatggatgggaaactggaaaggggatggagtgggaagatgatcttcccctggagtttgggcatccggcggccaatctcctctctgactaaccccagccgaaatcctctcaatgttcagatgctccttttcttctcttcttctatgtggcactgctctgctattctcctgttcctctgctcttctgctcatggagcctggggtttggggtttatatgggtataggatagtggggcatggtgggccaaaaggcaacacttgggtgtgaaaacagaagtgcctttttttatttagggctgtgggtttccaggcttcagggtggggcctttgccagggaactgccctcttctacccagcatttccctgcctcctgtctttatcaccagtagacttgttccctgctcttacaggatttcatgcgtgtccgtgtgaagagaccaccaaacaggctttgtgtgagcaataaagctgtttatttcacctgggtgcaggcgggctgagtctgaaaagagagtcagtgaagggagataagggtggggccgttttataggatttgggtaggtaaaggaaaattacagtcaaagggggtttgttctctggcgggtgggagtgggggtcgcaaggtgctcagtgggcaggagtgggggtcgcaaggtgctcagtgggggtgatttttgagccaggatgagccaggaaaaggactttcacaaggtaatgtcataagttaaggcaaggaccggccatttacatttcttttgtggtggaatgtcatcagttaaggtggggcaggacatattcacttcttttgtgattctttagttacttcaggccatctgggcgtatacgtgcaggtcacaggggatgcgatggcttggcttgggctcagaggcctgacattcctgccttcttaataagaaaaataaaacaaaatagtattgaagtgttggggcggcgaaaatttttggggggtggtatggagagagaatggacgatgtttctcagggctgcttcaagtgcgattaggggcggcgtgggaacctagagtgggagagattaagctgaagggaggtcttgtggtaaggtgtgatattgtggggatgttagaagaaacatttgtcgtatagaatgattggtgatggcctggatatggttttggatgaattgagaaactaaatggaagatacaaggtccgaataaaagaaggaaaaaaatgggtattaaaggactaagaattgggaggacccaggacatccaattagagagtgcccaagggggttcagcgtaattacttgcttggttggcaagtttttgggctctatccttgagtttttttatgttgtcatacaccaggccagattgatttaggtaaaaacaacactcctcatttaagaatatgcagagtcctcctttttcagcattgagtaagtcaaggcctcggcggttttggaggacaactgcagctaaagagtcaacttgggcctggaggactgataaagtttgtgatatgtgtgtgatgctagcagagaagtcattagacaggctacagaaggtcatgacagacgttgaaatgcctgctattccagtaccgagagcaatcatggaggcagaaagtcctaaaccgaccatcaagggaattagtggaataactcttttttgtcatgtcggtgtcatgaggggaacagggagctcttcggtcccatttgcaaattgaattttgggggtaaggaagactagtgtacatgtggctgtccaattggcaggtagacacatgtaggtagaggatccacagaggaagaagagaccttgtgcgaggcaaaactggagatgtaaagtaaaaaggtgagaaggagtgctgaaaggggtgtcttgtacccagactcctagggatccacctagggcggcagctgtcagaggttgtaatggggactgatggggtaactgcgtagagggggaggttcgattttcatggtgtatgagaaaacgttgagtatctacgagcaacctttcactgttattttcggggctgggtataagtaaacaagaagagggcctgggaggagagtctgatgagcaaggggaaggtagccaaggatggagtgaaatacagggcacgtgtcttcctaagcaataattactgctaatgtttttaagtttgtcagtattgatagagggcttgtctgtaatatggagctggaaggctccaattgtttcagtgatgtgtgtagttggacttcggagatgaagagtaaaggaacatcgagaaggtgaaaggttacccaggggaattccagtgggtctttgccgagagatacataaaggagcagccacaggaatagtagtttgtgttgtgagaggtccaaatatggggggagtagagttaatataaggagaaaggttttttaaataagtgcgaaggagggcggcagcttgctgatgtgaaatgtctggggaagtcttgctgaacctgtctagaaagtaaatgagttcttcaggagggtaaaggtgagggctgttaaaggaagttcggaggtgtagggagacgggagatgttgcccagtctgtctgtaagacggggacagctgtgtaggcactggaagaaagggaaatgcaaagccagcagttgttcgctaaggagggattagaagcagctaggagagaatgggttaaggttgacagtgtggtggagatagctggggagaggtagagggtgacataagaatgggaatgagaataagagtgagtataaaagtaaagaatagaacttcatcagggtggaagtattggagggtgccttgccagcaaagatcatctatccactttaagagggagttaagagtggcagtttggggatagcaccaagagatatcagctgtgatggcttgaagaaacagtgtaaaccagcagtgtaaacaagagtagggcatttataagtagttgagaatggagaataggagtatgaccggacagaagatagtagggatgactagttttttggggctcggcctaagtggtggggtgacttcgtaaagccctgttgcaaaaagtagggtaaggacgaacagacctaatagaatgaagggatgtattaggctcataagggttattactgttcttcagaaatacgagtgagtttaagggaagtgggggagagtacttgcgacttccaggaggaagaggagggattaggctggctgtccgatggacacagctttattctggaatggtgaacccagtggggaggatcctgcaggcggacggcagtcggggtactatagatgactaagtagggtccggtccattgaggttatagagtttgaggggtcagattcttaacaagaactgatcgtccagctaggttgtcttcatatggctggggatctggagtaggcaagagaagattagcagcctggcgaatttcctgtctagcctgctagagcactggaagatagtagcctagagggctggtgtctgggatgaggttggggccaagcaagaaagtgcgtccatataaaagttcaaatggactgtaccctgtagcatctcggggacaggctctgactctgagaagagcaagaggtaaaagtactgtccaatcctttttaagttggaggctgagcttggtgaggtgtgccttttaaaagaccattagtccgttctacctttcctgaagattgaggacggtaaggggtatgaaggttccactgaataccaagagcctgagaaactgctttggtgatttggctagtaaaggctggtccgttatcagactgtatagaggtgggaaggccaaaccggggaattatgtctgacagaagggaagaaatgaccgtggtggccttctcagacccggtaggaaaggcctctacttattttgagggcctctaacagtattaaagcagcggcagccgctgcacacagacatgagggctaggttaaaacagtaaggtcaagttgtttggacagaaaggctacagggtgtggtcttggctcttgtgtaaaaattctgaccgtgctaaccatgcctaggaaggaaaggagttgttctgtagaaggtgcttgggtttgagagattagtcggacaggattggcagggagagcacgtgtgtttttatgagaattatgccgaaataggtaacagatgaggaagaaatttgggcttgattgaagtaatgggggctgtctgtgaagctttgcagcagtacagcctaggtaatttgctgagcttgatgggtgtcagggtcagtccaagtgaaagtgaagagaggctgggattaagggtgcaaaggaatagtaaagaaggcatgtttgagatctagaacacgataatgggttgtagaggcaggtattgaggataggagagtatatgggtttggcaccacagggtgtataggcaaaacaatttggttgataaggtgcagatcctgaactaacttgtaaggcttgtctggttttaggacaggtaaaatgggggaattgtaaggagagtttataggctttaaaaggccatgctgtagcaggcgggtgataacaggctttaatcctttcaaagcatgctgtgaggtgggatattggcattgagtggggtaagggtgattaggttttaatgagatggtaaggggtgcatgatcggtcaccaaggagggagtagaggtatcttatacttgtgagttaaggtggggggatagaagaggaggatgcaaaggaggctttggattgggaagaagggcggcaatgagatatagctgtagtccaggaatagtcagggaagcagataatttagttaaagtgtctcagcctaataagggaactgggcaggtggggataactaaaaaggagtgcttaaaagagtattgtctaagttggcaccagagttggggagttttaagaggtttagaagcctggccatcaatacccacaacagttatggaggcaagggaaacaggcccttgaaaagagggtaatgtggagtgggtagcctccgtattgattaagaaggggacgggcttaccttccattgtgagagttacccgaagctcggcgtccgtgatggtctagggggcttccgaggcgatcgggcagtgtcagtcttcagcccctaagccgagaagatctgggaaggagtcagagagccttgggccagagttccaggggctctgggagtggctgccaggtgagttgaacagtccgattttcagtggggtcccacacagatgggacgcggcttaggaggaatcccgggctgcgggcattccttggcccagtggccagatttccagcacgtgtagcaagctcctgggggaggaggttctggaggaatgcctggccgctgcggttcaggcgtttggaagttcttgtgtgctggagatgtggctggggtttgtctcacagtggaggcaaggaattgcaacttttttctattatggtacaccttgaaggcgaggttaattaaatcctgttgtggggtttgcgggctggaatttaatttttggagttttatttaatgtcgggagcagattgggtaataaaatgtattttgagaataagacggccttttgaccttttagggtctagggctgtaaagtgtctcagtgttgctgccaaacaagtcatgaactgggctggatttttatatttgatgaaaaacagcctaaacgctatctgatttgggataaagaaaaaggagcattaaccttgactatgcctttagctccagccacctttttaagagtaaattgctgggcaggtgggggagggctagtcacggaacgaaactgtaagccggaccaggtgtgaggaggggaggtgataaaaagattatagggtggaggagcagaggctgaggaagaattgggacctagctcggcctggcgaggaacaacctggggaggaagggagaggtcagatgggtctgtagaaaaggaagattagaaagactcagcgatgcttggggttggtactgaggggacaggcaggagggaaagaaggaagatttgggatgagtttaactggtcacagagactaggaagggactgatgtgtaaaagaatgcctggatgtcaggcacctcaggccatttgcctattttatgacaagaattatttagattttgcaggttggaaaaattcaaagtgccattttctggctatttggaactactgtcgagtttgtattggggtcaagtggcattgcagaagaaaataaggcatttaggttttaggtcaggtgtgagttgaagaggttttaagttcttaaggacacaggctaaaggagaagaaggaggaatggagggtggaaggttgcccatagtgaaggaggcaaaccctgagaaaagagagcatagagacacggaggaggggagtggggttcttgccctccagaaaagcagagagggggttgggacacggaaataagggattggggcacagagataagaggtcagggtgcggaaataagggattggggcacagagataagaggttggggtgcggaaataagcgattgggggtttcttgccccctaggaaagcgggacttgccgctaagggtgaaggagaaggggttgaggggtacttgcccctgccccaggaaagcgggacttggcgctaagggtgaaggaccaaggcaggtgtccctgcgtggtctgacacccttgaaacgtgagtgtataatcagagaggtgtccctgcaatgattaaacaccaagggaaggctgccttcccagtctgtgaccagcgccggagttttgagttcacggataaaacatgtctcttttgtctctaccagaaaatgaaaggaattgaaattaagagaagggagagattgaagtgtggcaccaagattgaaaggagaaagcggttgagggatagtgagggaggttggagaagagagtaaaaaaggccgcttaccggatttgaaattggtgagatgtttcttgggctggtcggtctgaggacctgaggtcgtaggtggatctttctcacagagcaaagagcaggaggacaggggattgatctcccaagggaggtcccccgatccgagtcacagcaccaaatttcatgcgcgtccgtgtgaagagaccaccaaacaggctttgtgtgagcaataaagctgtttatttcacctgggtgcaggtgggctgagtccgaaaagagagtcagcgaagggagataagggtggggccgttttataggatttgggtaggtaaaggaaaattacagtcaaagggggtttgttctctggcaggtaggagtgggggttgcaaggtgctcagtgggggtgctttttgagccaggatgagccaggagaaggactttcacgaggtaatgtcatcagttaaggcaaggactggccatttacacttcttttgtggtggaatgtcatcagttaaggtggggcaggacatattcacttcttttgtgattctttagttacttcaggccatctgggcgtatacgtgcaggtcacaggggatgcgatggcttggcttgggctcagaggcctgacacaggacttgtgggaatataatccatggctgtttgactactctgaactgttatactgctgtttttctgcccagggggatgttaaagccaaaagcaagtaatcaacaagattttttttaatcttaaaatactgaattaagccttaacctttaaaacaatttttgttgtagacatagatttgctatttgtttcagacatcctttaggcttttgatctagcacatgactaccccttcttaccgcattgcccctggatcccccaaggagagacacatggctacctcctttgtaccttggcccttgctgtactgatcacagctagttaggacagctatgaaagcctgctccatgcagaactgattctgttcgcatgagaatttggaattggaatttagagctaaccagttggtctgtgtttgtcctgaacataacataaaaattaattgaaatgagagacagagagaggtgtattgttgtgggggcgggtgagaaagtagggtgagggaagggaaggagggaatgctgaagtatagagcagagagcagcagagaggtgagaaacaggaaaacattcctcaaagcttctccactcccagtccaggaatcttgcctagccttgagttacagaacacactgttatctctggataatacatttcctattttgctcaaagtcctggtgtgaatatgcaaccagagatttttaacgtaaaaagaagctatgagcatatgaatggaagttgaagacctgagaatggactaagggactcagggttagggacagaccctaggaggaaagatggcattcagagatagatagttaaaaaacaatcaagaaaaagtagccagataagtaggtgaagaactgcttgacaatcaaggaaagattggtgaattaggtaatattcatttgcataaaatgttgcccagtggtcaggtaggcgaaaagctgaatataggcagttagattttaccatttttatgtttctatcccctgctacctgactaaactattttcaaaatgtattttatagcttagagccttcccaaaattcctagtattatatataaatttccaatacatattgatagctgaacaatcatattttcctggggtttattttaataatatatgcatttattttagccaatgatattcacaaagctttgctgaaatgtgttttgtttaacttggttctgtatatttttccatgaaaagccatactaaaaggacattttccaagtattaaaaaaaaaagcaaaaaaccctgcagtccagaatgcataatttgttctgggatagttaaaattctaagagaagtcttctttgttctttccttgctctttctttgttctccaaaagggtcgtatttaaactatgggtcatttctcatctgaatagccagggaagattagctacattgctactgatgcacttgatattttctcattacataacatgtggccacagattctagccagtctgataagataaaatgttcataatacttagaagataaaagggaatcatcactacttaagatccctttaaatccaatctgttgatctgtatgagattacatttttggctctcatttactagttccccctaaagaaagtcttgatatagctactgggttcctggcttgtattttgatagtcaaaacggcagtctggatatttttctactcagtagatacaatagaagaccaaagcttcttgcattgtagtcactgaccttgccatgtcatttcatattttctgtagatttggtcctggaaaatcaaatattaagcaagtttgacagttcagctaaattccataaggtcatctatcacattacatacagtaattgattttacgttaattggtctttagtttcatggttcatgtttctggttttctggtagtttccagaaactttcgtgttaaatgaagagctatgctatgtaaataaaattcagtaaaacttccctttcattttaattatgtgcttttgaaaactaattttattgggttctttaaaaaactccgtaggagtcaggcatgaattttctactctttagggcatttcaatcatgaaagaaagaaccatctatatttttcatcatctcaaaacaattttagaccactactatttgtaggtacaaataatgttcattgatttgctttatatttattaatcacctaatagttatgaaatggtgccctaagtactgtgactaaaaaataaatattagtaagttaattttactaatttttatccttaggagctttaatttatgctagataatatctgagaaaaagtcaatagtatgatgctgtttaaagaaagaaagcaactgctatcctgtgttgttgtattagcagaattgtcaaggataaaataaataaggtgaagattagactccacttggcaatctttagcccttgattggagtaccatgttccatttgggaaggcacacttattacaacatagacaagtttggcagaggtttcaaaagaaagcaacaaaaaaatgatgaagggccttgaaaatggggcctgtaagaaaaggctgagagacgtgagaatgttcaatcttgaggaaaaaaggcagaggggacacatgataactgtttacagatgcgtaaagaggtgttatggagagaagagggacctatttttctcattagtcaacaaagacacttcaagaagtaatgggtttaaaacacgtggggggaaattcaggttaattattagattaagttaggtaaaatttaaatatttaaaatgttatgattccaagcataattaggctgtggagactaaatcacattagaattggcataggaaagtgagatgaaaacaaattcaatctgaatgcagagggttaattattgcaagtttatatttgcattaaatgttatcatatttcaaaatactttcacatatattgttttactgatctctggacattcttaggaaagagagagtgtatcagctagttttacagctgagaaaatggaatttcagagaggcaaaatgttgcttcgaacccccacactccagattagatagacaaaactgctaagtgcataggattagacaagcaggactaaaagccaactcttcacattttctgtcaatatgtttcacatggtaccttgctatcttttcatttgtaatatgatttctattgtggagaaatattgtttacatagaggaacaagaaacatgattgaacttatatctgcattacctatatctattatttatctctcactactcacaattgtgaaataaactcagcactttggtattatattttgacaaatcattgccaaacgtaatacaatctccagttggtatgatgtggtgagaccctaccttctaccattacctagaggtggagacacatttcatcttttatgaatttcatattcctcatctgtaggaagaaaattataatatcttctggtttcttctagttttacaataaggagtgaatgagaaaatacctgtagaagtacctgaacttgttcaaagaaataaacttgttcaaagcataaactttgcttggggggaaatgtgtgttgtttttggtgtactgtggattttgataatccctttccagttttattttcaatcctaccttttttttttttttcatttcctaatttcagattcctgaggtcaaggccaatgtctttgttgaagcacttaaaatttgctagtctaatgtaggtgttcagtaatagttggtgggtgactgagttaacaaatggatgaataaatactttcagttggatattatgtctgggatatgagcaagaggtgataaatgccatatataatcatcttgttatactcctttatgtaatgatgtatgtttaaagtattttatagaaacatggtatgccagattctcagttagatcctgagaatacaagccactcaaagtctaaaggggttttgcagaccactccaatgctaggtatagacaaaactcttcccagcaaagcaaggtagctgatgccaaaatgttaccaaggaaagacccattggttggttgccaagacccttatggagtctgagaagatgttttagactccctcaaccatgcacacaaattgtgtaaagtaatccaggaggcagcctaaatggaaaggctgttagtatgctgagcttgctaggaaatggaggaattttacggaaaatgtcagcctctgtagactcctgtgatgctcgctagggtgccagccttccccagggagcccacagcacctggcaggcagactgcagcagggagtctcactgggaggatacaaaagagcttaatggccccctgtgcataatgttgaaagaggctgcaatttttgttttcttcggagattaacgtgtgtgtattgcaggttcaaaatggtaagaatcttaattagagttgcaggaagttgcataatatactccatgtcttactttttccgcacaccaaataacagaatctatttgccaaattatgaaggttgatggagaatgaaaactgtaatttgagtaaatgggagccctgcccccattttttccagttagtcacaaagtttaaaatgcaaagaagtaaatctcccaagggagcaattctatttcatctgtggaagaaagacatatgttgttactgatgaaacctctgttgtgaaagcagagccaatgctgggaaaaacttgaaggaaaaactagctgagagccctctgtctcaggagcctgtggcctttgggtccacccagggctgcctgtgcctcttcctgaggcttttcttgaaggcctgctctttcctctgattaccttagggcaattgcctgcctctcttaagagaaaatgtacctgttttgtgccacatcccttcaggcccctgagctggacagtagattgatctgacagatgtcactttgatattaaatcaatagtaccaatatgtttctgggttttcctggccttagcaaggttttatgttcacttacttagagacattctggagaatatctcagaactcaaaacatgagatcaaattggagttctatgggagagaggatattgaattacttggctttattatggctgcactcatagggccagccacgtgtaaaagtttcattctctttttttgaacaaatatttattgaaaacaataaattaccaagaactgtgttaaaatatacagatgtctaagcagacacggcacaatctatggccctaagaagtctaggaggtacaatattttatataaattattcatcttcattcaaagttatttattgagcatctactatgtgccgtgcactgtgcatgcccctggaaagcataagagacaaaattcctttctttgtgggagctgtattctagtgaggttcagcaggtgaacagcaatccgtgttaattatttcttcttccactgaaatgaaaattctatgtttctaaaaaatattataaaagtactcttcaaacctcatattaagaaagtcaaattgtctttagccacatttgataaggattaaagataatcttactattttattttaaacatatttagagcagtccttgtctgaaggaagcttgtgttgaattttttataaagtgagttaattaccttctaattaattttgtgtgtgtgtagtgctcacctaacacaagattttcatgctgaatttgctcccccaaaagaaaaacaattcctatatatgttgtaaagggtcgcaagtcagaactgagatggaggcaatacaaatatataaccagcggcctcagacaagttcccaaaattgggaagaatgaagagatagggaatgactgcagagcctttttcaggaaagcatgagattggaagatgaatgctcaagtaaattagaactcaggaaaagtactgaacagcaggatcatatcatcaaaaatctggctgataggttttgaactcactgaactgaatctatttagaagtacattttgggaagactaaataaacatcaacactatggtctattctaattcaggctcttgctttgtctattttccaggtgataaaacactgattgttattagtgttatcatcaagcatattgagcagtcaatctgtaagttaatagcaatacacagccatatagtcctggaactagaaggaaagaaaatgaattttttcttttttttttttctttttttttctgtagaggggaagaaaaattcaacaccttgagtcagctgcgactcaagggtccattataacttcgagatttttaacagcctgtgcctagggtatgggagatgaattttgttccaaagtggtgacatgggcagatataaacccctgggagcaatttcaggcaagttgagagtccattctaaacaaaaatggacagaatgtggaagatggaattcccacacttgctttctgaccttggctgatattcctcagcagttggtaattagaggaaatactgaagctgagaggatgaaagaataaagaagagtagaataatcagaattgaaagaatgtaaataagtaataagatggggcaaaaacaggaatggtgtcactgacaaaggtggccacactttgcagtaagatgtgagtgggacatagaaactagatttggttgagtaagaggaaaaccatatatacacacacatatatatacacacacacacacacacacacacattaatatatgcatatttaaaaatatatacatttcaaaagctcatttatgttgaatactaagtgggaaattcatcagctgtttggcttcctgtctgttttattctttgccattgcagacttgagttgtcttcctgaaatctttctgggagataactgcatgcccagcccttttctttcatcagaaaaagggtattctgccctgagtcagaagcagggggaaaatagatgataatatctacatgttattgctagaacagagtcaaataaaaattaaaagtccatcaagtgatcaggttgaagtcaataaaaaggtcaataaaaagcaaggatgagccaaaaaagaggacttggtgtactggaaaatgccaggaaaaataaaagacagaaaaaacactgtggcaagatcttctcctgtggcctcagggaagtgcatgataaaattaattgaagcttatcacccatgaaaaagggctacagttggagcaatagctgcacggactacataacagtacaggttctttagcctaagacaaagataacagatttttgttttacttttgcaagcttttttaatatactgagttaaaactctctttttttgcctttattcaactgaatgctgcattttttgagcaatactaagtgttgattggcttacttgaacagcaatttgttaagaggcctgctgtgtaccggccattatcctaaataccagtgtacaaagattagtgatgtgtctatctgctttcaaaactcttataatctgtagcaacatgagattaatttttacatatggtttatatataacaatctaattccaatacaatcatatcattctccatatctcataagaaattgttttgggacattatttaaagaaaactttatacaataaatctataaattgttagtagatttgactcctcctttagatgaaagttttcatcttgtcgtttttttaaattcaaaatatgttattttaagttgatataaaacaatcatattagcaaaatgcatccacattgaaaacttagctggatgggtaaagatcgctctattaaactgtgatgtttaatactgagtgtcaacttgattggatttaaggatacaaagtactgatcctgggtgtgtctgtgagggtgttgccaaaggagattaatatttgagtcagtgggctgagaaagccagaccgacccttaatctgggtgggcacaatcaaatcagctgccggtttggctagaatataagcaggcagaaaaaggtgaaaagagagactggcctagcctcccagcctgcatctttctcctgggctggatgctttctgcccttgaatattggactccaagttcttcagttttgggacttggactggctctccttgctcctcggtctgcaggcggcctgttgggaaccctgtgatcatgagttaataaactcttttacatgatattctcatgatagtgaataaatttcatgagatctgatgggtttatcacgggtttctgcttttgcttcctcctcatttttcacttgctgccaccacgtaagaagtgcctttcacctcccaccatgattctgaggcctccccagccatgtagtactgtaagtccaattaaatctctttttattcccagttttgggtatgtctttatcagcagcgtgaaaacaaactaatacaggcactgttccatctccaaatggtcataatttatcagttcaaaggaacgtactttgcatgccaccaaagggttttctaagaattgggtcagcaattttaagtcaaggttgttggttctgagttgtacctttgagtcagtctttcagcattttagttctcaaatctagttttctactctttccaatggggttattcatccaatagacatgggaaaatcatcctaatcaaaacaaatttatgatcatttctctctggcatgactgcatcaggtagcttaaaccatagaagtttattgtctcacaattctgaaggctagaagttcgagaaaaagatatcagcaggattgatatcttctgaggggctgtgaggaagaatctgttccatggttcacccagcttctggtggtttgctggcaatctttgatgttccttttgcagtgtcaccccattctctgccttcgttgtcacatggcattttctttgcatgcacatctgtctcttcatatggtgtttcttttataaagacaccagtcatactacagtagggcctcaccctaccccattgtgacttcattttaatttattacatctgcaaaatccctatttccaaataaggtcatattctgaggtatgagtgggttggactacagcatatgaattttggggagacataattcaatccattataatcatactgcataactgacgagaaagtaaagaatcaatctgatgcaggaaagataacctaatcaaaaagaggaattaaacaactccaactaattccttacatttaatctatttaatataaaattataattttgcaaacacagcatggtgcactatggtaactaaagcaattggatgatatttcaaaagctttaataactagtatttaatcacagatgctgtgtgtttttacctgaaattcatcctggtaatgcaacataattaattgcacaatttattttagcatgagttttcttatatttatagagatagcatagcaatcttgttttcaaatttccctcagaatgcttgagatcagacattattagcatggagacaatagtttcattgtcaactcctgctggtttgggtacatttacagtaataaccacaatccactagcttgaattattgttcaacattctatgtgacttcatgagggtattaatatgcaagagagttatttgatactaatcaaagatacacatttgtcttcacacttattacaatatggtaaggtaatcacataaaatacttaagatggtagacttcatacatatatatatatatacttttaatgaatatactaaagctaaccgttaatggaagctttgacagaaactcattgttcaatatccaagcaaatcaattttggactataaatgcagaattctaacaagcaaaaattctaatcattcattttatttttctgttattcgtggcttcttatattgttaaggcttaacatattaagatgcacataggatttaatcttcatgagagagcaatgaatacatcattgaatacataccaatcatgtgtaattgttttcatatgtatgtaagcccagcggaaaagagtcgttcattgacagtactcattttcccatttggtgtattttcctaattgtacagtataacagttatagtaaatggttataaatattaccctttagctgtaacatctatgacatttttgttgatcatgataatatgtgattgtttagtcaactgagtttattgtaattgagattggaaatcactataagagtgaaattgaatatatagatagagaaataggataagttaatatggcagctcaacactgaacacagactacaacttcttgaccaccgaaatatgcaaaatattatataatagcttgtatctggacagcgtgctaagctgttcacttgttctttatcatttaatcctcttttcaaatatgtgagatatgttctgagaagataagcaccttgttgagtcatacaggtaatacattttaaaggaggaatttatatacacttaagattgtgtgtgtgtgtgtgtgtgtgtgtatgtgtgtgtgtgagagagagagagagagagagagagagagagagtttcaggctccaagacagatattaatggtagactgcctttgttgcataactgtagcagtggtgtacaactgctactcccatcttctcagtacttcatctctttctttgaatcaactacagctattctgatggctagattatgatctgccagtttgagaatccaactcttgctggccagagacttacagttaaaaaataaatcatttagagtcatatgcttatgtactactgggctgtgatcctcaccctaaagctcactttggcatagctctttacttgccatcgattcttgacagccttatttcagaattcttacagacacagtgtctatttaattttaatacaatcaagcaatggtttctggacatatttggctatttctttgaaaacaatggaatctgtcttatgggcaaaatgacttttttctgccctaaatgctgacactgaattgcgttcaatcatgacagaatttgtgcaatatgaaaagtttgtccactgggtggacaatttctatctagcatttttctctccttcagggatggactttaagttgatttgacaaaattggtttcatatgaacccaaatgcaaaccctatattatctttaaacactggtttctgtgaagttgtttgattaaactaatactgttgactccctgttttctgttttatttctttaagatgacatcccttattctgttctgctacctgggacattgctcttctctccatattaattaattaatattgtttcctaaatctgtcttcctagtctctgtgtttgtcttcaccatgtgtattgggatatattctcgaagggtttcatgtgtgaattccctcttgagtcaaattgtacatgtaatttcccttcattttaaaaataaataagaaatatgagaagaattttcaaaacttttatgttctatatgctttcctctggtttggaaattaatctctgaatttatttatattttaggtattgcaatttgagaattagaagagttgtttttacaaaacacagaaaacagcttttgttttaattatttttcccagtgtgtctaagagtcaaaaagactctgtattagtattcactggcaaacagaacacaatgcagagcagatatcctagaagcaacatgatagatccaatcatccgattcattatagtacaaatattgtaatcaatcataatattcagtgttccataaatccacaattctgtgaaagggataagaaaaaagaaattaagctatcagtgagtttactaaaaaaggaaaagagatttcctgattatcatcattcagaattagtcagacatatacatggtaatcattcatattttaagcaataaaaggaaactcaacacaaagcctggaaagcaacagccttttatttttattttctctaagatgtgaaaaaatagacctaggtgctaatttaattcccttttaagttaatgacataatgggtttgtggagcattaaatagggaataaatatggccttacatttccatgtcggagctaaatgctttctcttccctcagcttctaattcctcagctgagggaagtgatcagcagtcaacgatcacaatgagggagctacgcacacatcctctggtttcctgagctttggaacacttaatgcttagtgcagcttctctattttgagttctaccatgaacccctctctgatgactcccacatatgtcttttttatgtaagcacaccaagttcagctatccctgtaggtagacagcatttgagacttctcagttgggtatgatttgagaagataatggagctgatcctcttgacataaactagcctattggtcctgcccaaactggtgttccctggaacagaggcctaaaaacaaaatatatttaaaatgttcaaatatatttagaaaatattgtgttaaatcaagttagccagatttttgttgctttcattgtcatttttgttaatattgttgcatgatttccagaatattcagtatgcaaataaatattcattatgaatttaacaaaataggtattttctaaacttctttgaccttggaactcttgttctcccttcccaaccccaccattgcacttattttaacattgcactcagcagggctatacgcatcaacattttgggaatttgaggatgaagatatgtttttcctattaaaaatgaattcttatcccactgggaaagaaaacacattaagcttttatcagtctttaacattttaacatggattagccattctgctctttctggattataagcagctgagagcaggctttcattatagggagagggaaagatgatctgaagtgtcatgtgtccccagagaggattttcaagtggaatgccaccatgagagttcctgggctagcagaggacaacttcatatagtgcagggttgcagcaaggccactgacaccagctgtatatagaaagttatgtttgcctcagtttcttcagccaaaacagaggaaatttactagatagtagctatctccctcttagctctaacaatacaatctgattatcttgatggctaagtgtgggaactgagagagttagaagagtgggggtcactagttgaaaaagcaaggttagaaatgaatgttttctcagtcatggctggcctagggctggctctgcaggagttcatgattctcatctccccaaacaacaaagagccatggaaaattcatcagataacagtaattcaacagataacagtataaagactatacatatttttaagatagatttaaaaaatgcatgacatatttctggcctccaatgagtgttcagtatgaaaaaataccaactagatgaataagtataggcaagcaaaagattctaagtataagaaagtgtgaaaagtaaaatttattttatttttctttgaaagagcagtcttcccaggtcaagagattagaaagacaagtaaggtaatgcctcttctctgaagtttagaacagatgaaagtgacacataaaagcagaataagataaatattatatcatagtaaaaggaatgagaggttgtatgtagagtggttgtggacttggactcaagagcatgtggacacaaatttctaggttaaattccctggattcagaacccatttctaccatcttactaggtctgtgtcctcttgtgtaaatggtagtggtgatgataattaccatgcctttctgctagaactattattaggaggattaaagaaaattaatatgtataaagcatctagaagagtgcctcacataaaataacaaacataagtatttactatcattaataataaattatatccaactagaatcattataaggggttttagaaaagaagtagcaataagataataagtgaagaatgagtaaatttttgaagctacaaatggattgaacatagtactctagggagagggacaatcatgaatgaatacatcaagatgaaaagtcaaagggtaaattttagaaatagcaaatagattggtttgctaatataacatactggccctttactgatcatgttgatcattttgtgagaaaacagtaggaaatgacttcagaaagaatatagtttggtaaaaaccattttaactgtaggagaatgaaactggattctcatctctcaccttatacaaatatcaactcaagatggatcaaggacttaaatcaaagatctgaactaaaaattctagaagataacattggaaaaacccttctaggcattggtttaggcaaggatttcatgaccaagagctcagaagcaaatgcagtaaaaacaaagataaatagatggaacttaaccaaactaaagagcttttgcacagcaaaaggaatagccagcagaacaaacagaaaacccacagagtgggataaaatcttcaaaatctatccatctgacaaaggactaatatccagaacctacaacaaagtcaaacaaattagcaagaaaaaaatgaacaatcccatcaaaaagtgggctaaggacataaatagacagatctcaaaagaggatatacagtggccaacagacatattaaaaacatgctcaacatcgctaatgatagagaaatgcaaatcaaaaccacgacacagtaccaccttactcctgcaagaatggccataatcaaaaaaataaaaaaataatagatgttgaagtcgatgaggtgaacagggagcatttcttcaccgctagtgagaatgtaaactagtacaaccactatggaaaacagtgtggagattccttacagaactaaaactaccattagatccaggaatctcactcctgggcatctacccagaggaaaagaagttattatatgaaaaagatacttgcacacacatgtttatagcggcacaaatcacaattgcaaaaatatggaatcaacccaaatgcccttcaatcaatgtgtggaaaaagaaaccactgtatatatatatacgtgatatatattgcatatatatatgtgtgtatatgtatagtatagatatatgtatatatatagtatatatacacatgatatataatgtgtattatatattatatattatatataatatatataaatatatattttatatatataaatatatatgatggaatactactcagccatacaaaggaattagttaatagcattcacagtgacctggatgagattggagattattatcctaagtgaagcaactcaggaatggaaaaccaaacatcatatatgctcactcaaaagtgggagctaagttatgataatgcaaaggcataagaataacacaatggactttggtgactcagggggaaagggtgggaaggcagtgagggataaaagactacaaatagggtacagtttatactgcttgggtgatgggtgcaccaaaatttcacaaatcaccactaaagaacttactcatgtaaccaaacaccacctgtgcccagtaacccgtggaaataaaaaataaaagaaatttttgcccaaaccaatgtcctggagtgtttctccagtgttttcttctagtagtttcatactttctggtcttacatttgagtctttaacctatttaaatttgatttttgtttatggcaagagatagcattctagttttattcttctgcatatgtatatccagttttcccagcatcatttattaatgagactgtattctccctaaggtatgttgttcacacttttgtcaaaactgcattggctgtaaatatgcagatttatttctgggttctttattctgttcttttggtctatgtgtctgtttttatgccagtaccatgttgttttggttactatagctgtgtagtataatttgaagtcaggtaatgtgatgcttccagctttgttattttttgctcaggatgtcttggactgttctaggtctttcgtggttccatatacattttaggattttttttcgatttttataaagaacttcattagtatttcgatagggattgcattgaatctataaattactttgggtagtatggacattttagcagttactgattcttttaatacatgaacatagaaaatgtttttatttttcatatctttttcaatttctttcatcaatgttgtattgtttttattttagagatttttcacttctttagtttattccaggtattttattttatttgtggcgattacaaatgggattactttaattatttctttttcagattgtttgctgttagcatacagaaatgctactgatttgagggaaactcttctacactgttggtgggaatgcaaattagtatagccgctacgaagaacagtgcagaagttccttaaaaaagcaaaaacagaatggccatatgacccagcaatcccactgctgggtatttatccaaaagaaaaacatcagtatatcaaagagatatttacactctcatgtttatttcaacactagtcataatagccaagatatggagtcaaactaagtgtccatcaatggatgaatgaataaagaaaatgtggtacatattcatgatgaaatattcagccattaaaaaagaataaaatccagtcgtttgcagcagcttggatagaactgaaggacattatgttaagtgaaataagctaggcacagaaagacacatattgcatgttctccctcataggtgagaactaaaaaaattgatctcatggagacagagagtataatgatagttatcagagcctggggaaggaaatggggagggggataaagaagtgttcggtaatgggtaatgggaacggaagtacaattagatagaaggaataggatctaatgtttggtaacaaaatagtgtgactataattaacaataatttattgtatatttgaaaataactagaagagtggaattggagtgttcccaacacaaagaaatgatgcttgcttggggtgatgcatatcccaattatcctgatttgatcattatacattgtatgcatttgtcaaaatttcacgtgtggcccataaatatctacaactattaagtaaccatgaaaattaaaaattttacaatttaagaaaagttaacttgacgagaaaaagaatacagtttggaagtcttcgaggatagataggaagagattttccatttaatttggttttaaatgggatcttgtctatgtttgctcagggtaatcatatgaaaggcattataatttgaaagcttaatctcaaaatagtactttttttggtaaccagttgtcttgcagcaaaaacaaaagcactgaacttgggtcaaaatacgtgaattcaaatccatactttataccttcagaatcaaacactctaagcctcattgcgttactctttaaaataaggaaagtgcatctaaattacacattgtttttagtagcaaataagttagatgaaaaagcatcaaatgtaatgttgggcatacataaattttcaatcaacttttaactatataatattatctgaacaagacaagtgaagaatacaattgtaattttttaaattgcaaggcaacagtttctaccctaataatatctacattttcctcataaaagtcagtgcatcagattctatacagtatgctcttcaaattcttggctccaaagttagcaaattaaacatcccatctcatttctagtttgcagtgaaattctcaaaaagtttccagaatccctgatgttactcatcctgagctacatctgacttctaatcagcatcttttacttagaatacagatagcaaatctggttggcagttattttccaatgattcttctgccatactgatgctttataatggctccaaggaaaggccattctacaaataaaagcaaaattaataaaagaatgcgggataattgacagttttgctacaacagcatttaatttgaatcctttgaaacttactcttcactcattgatttttaggctcacaaattctttgtgtgaattctctcttttacttttgcattgtgaaatgatttatcatttgggtaattttccagaattacactttattattttgtaaatggcatgcagcacagatggatattagcaaggtctctgtataaacgccagcaatagaggtggtaacattgccctgagagttttctcctgaaacaaatcaaataaagaagagaaagcattgccaaagctggccatgacagaggaagtggatccaataatagacatctcgatggatacatatatatgattcaatattgtgtgacctttactttcaaactcactttcagaaaatatattctaaaggggtgccaaggatattgctgtctactctctactgacttccatgaaaggaaacaccattcctctgtatctcagtcatcaatgagtacatttatgaaagagtttggccattgtcaattctaatgccgttaagaagaacttgagcatagcttacatttttttcctcattttactcctacttgtatattgctttggcatatactattagtgcaatgctgtgacttccaaaacttctcagaaagtaacaacttggactgttaagagactccagcatttgaaatatattttaatgcaaactgtctccctgaagacctctatccatagctaagatagttgtatccgaaagctttgcgcttacttctttgcagtgctatttgtaaacattggcatagtaagagtgataaatttctatggaatcatctttatcaaacatacattatagaagtagaacttattccagctaaccacattatcatgaatagcattttccatatttctttgaaacaatacaatagaaacaatattatcttaaacattaagtatccccattgattggtccagtgaaatactgcttggaatgaaggcttcaactttaaatctatttaatcaaatttggtaaaacaatcatggatcaaatatattattaatgttacgtggcttttattattattattattattgcaaaaattaggagccttggtttttgtggccttattctatttcagttagatataatatctcctggccttgggtgctttttacatacaaatggggtaaaatagttattataaagaatagagattgaatagatgtgcttagagtaatgtctgacacaaagcaagcactcggcccagcacagtggctcatgcctgtaatcccagcactttgggaggccaaggcaggcagatcacgaggtcaggagttcaagaccagcctggccagcatggtgaaatgctgtctctactaaaaatacaaaaaattagccaggcatagtgccatgcacctgtaatcccagttacccgggaggctgatacaggaaaattgcttgaacttgggaggtggaggtagcactgagctgagatcccgccattgcactccaacctgggtgacagagcaagacctcatctcaaaaaaaacaaaaacaaaacaacaacaacaaaaaaagcaacggctgttaattgccaggaagaagagctcctacaattgtttcatgtgcatttaggcactctcttccatgtgagaccccaagcagtcagcaggactatcaaaggaacccttttaagacttagatatctatttttaattcttgcactgcatttctactttgataaggggaaaaggcattaaaacacatttttgaaatgtaaatttccaaagttacaaaaattaacccaacacatcatatgctctttgaatcacttaaattggcagctgtcttataatgataaaagacctacggcgttcttagatgatgtctacatgatgccagacagctaattgaattaaggaattaaggaagatatcaactagtccttccccttatttgccagatgaagaaatggaggccaagaaatgtgtagtgatttatttacatcaggggttgagtctgttggtcgtgagaacttctagcctagttattttttccaccccatctatctgtcctgaaatttggtttcttattgctgcagcattgaagagatggaaccactaaaaaaatactgataaaaagatgtttatccagaggcaactttaatggcaactcaaactatttgaaatatgatggaaaatttgttactgagtgaaaaggccatcgcacaatcaaaattgatgtttaaagctcgcctactaactcttccacactatccaatgtagtggtcctccttcattttgctctttagagtttccctaattttctttatgcatgcatctgatttcatcttactttagagaaaatactaacagtgtatgtctagaacatggcagattggagccttatagcacgagaggcagggaaaagacagctaatagcgattcactgataggagaagaaggggtcccatattgtttgagttttagataacgtttaatgatcttcctggataacagattctatgaggattttttttttttgcttgtttaaataaaagctgattcaatgataacaaaaggagagacagtaacttcagaaaaatatagatatgctaattcttacatttgtagagcccttttgatattaaggttcaagatctaaaaatgtaattctcattcaagaccgtataaaaattgttagttctatataagcatattgaatcactgatagattaaagcacattcatcatactctagaaaacaaggaaatgtgtaatatatttgatgtcatttttattacaattgttaaaatagtgaagaataaacctgttaactagaaatctatgcatgcagaatgtcttattacctaaataacaccagataaatgaggtgttactgtccacagtctcacaacagagacatgaaaaacccttctttacactggtaacccttaattaaactgaatttttggtgtgtcccttcaggagaaggtcaccatatcagcaataattaggggaaatggcattgtgaacattactggatgagatgtggtgtatttcttactttcaattattgcctccttgtttgaatcattagcatttggcagatttgttgctgaatttgttgttctgatttaaaactcggtgtaaggttgaatatgttcttatcttgatcttatatttctgccatgacttgcatttcttgctgagtttctgacttgaattgctctatgtttttgctgagcttttgctttgtcttgttgtatttctatctggaggggtttccctccgcctttttctttttgttatatctcttctttggcctattgtatttctctggcccattcattagctttttttttcctttaaagttattctcttgttcagtatatgcagtacctaatcaatacgcttccttgcttgctgcaggatttccaacttactgtgttttctgtcagctttgatactgcctgagaggggtttctgtgctttggctaatatattgttgtctgaattcgcagtgttttcagctcattacactgactttaattttgatgtatttgtattttatccagttcaagtcatgtttctttcctctgtcaatttaattactttctgcctgggcaacattgtgtttatacaattgctgctaaagcgacaaaaggtttctatttaaattaccacccagagcatcagcaattcagcctaaaaaatatgcagaactcctctgattgatgtcttacctttctgtggataaggaaatctagtctattgagaggatcttctttatagaacatagtcaagcctggtttatagctgtagagtcattaacagaggagatgagtgtagggctatggggtcactgtatgacttctctgtaagaaaaaaatgtatgactaggttctattcagtacaagtcatgtcctaacagcaggaaaaagaaaactttcttaggtgtttaacttatatttaggtgggctacccaagctccagctcttatttttctatgtgttatatatattatacacatttctgggtttgaatcttgttctttctaataattttgcattgggctgtgtaagtcaggaacattgaatttccattgtgtacataaaactatagcaactggtctaaaaacaaataatgtgggaaacatagtaactgttcctgttttcaaaggcttacaataatgcgaaaaaaagggaaaagcttatgagcaatacatctttgaaaacagaaacagtgaaaacactccagtaaatacataattggttattaatagaattttaaattggagaggcataacaattgcaacagctcttggaaatgcttaggaaactgaggcttataggtttacccgaacatatgtcatagataacattaatcaactagctgatgaacatgaccagcaaatgcattgattgcctgatcagcaaatgcttcaactgttttgttttacaagacttaatatgtttaaacaacaacttactctttacctactttttaaaaatatccttctgtattttctgcaacaaaccattgttgagtccctgtgcttaacaaaactgtgcaactgtgctatttacccagaggaagaagaaagatttttttaagtcagttcttttctggtaagtgtaacttttctagtattggataatctttctgagcctcagttttcttatctgtataattggcataaatgaaccatgagaaacaaataaaatgacatattcagctcagtgtgtgtcacatggtgagagacccattaagtttgctcttttccttttgcctttctcttttcagtgttcagtcattatactgtcaaataaattggagtttctggcttttctcacactcaagattattatgatatactacactagtacatctgaccttgataaaaagcaattttctatagtttaattgtatagcaataggatgggaaagtctctgattctcactctgtagcttcttcttcccagggctggagtcatttaatctctacctttaggctcattctaccctggtcccttgggtcatgaattcatctggaagattcagacttatgctttaaggctctcagaaactcaatcttgcagaagaatctggcctccattttgtacacactttgttcaaagagcctcctagcaccttcccaagacccacatataccactcccattttctctcttggttctggtgattgactctctttatgttcttggaaagctgcctagtatcctaaaaccagtattgctgcctggctgttaccaggctgcaccctcgactaaagttgatcccctgcactcatctttggactctagatttctattacatgcacatcccttgtgccaaattatgctggcttgtctggccttccaagtttcacctattgttatgcttatttgtcagttcaagtctctattccagctctatcccacttccttctttctttagcctgtgtccctctcttggatccctgaaacattttgagtactagctactcctatgtcctgcccatgtgattaagaatgatacttttctcccgtgcttgcagctgggtagtcatactccatacccacccaggtaaaaatgtctggatccaaatctacctttcataacagatctgatgtgctattctagacagctttactccatgatatattgcagactttatgtaggttaacaaagcattatggtgtcattcttgtgacagccctacattttcattatgatttttgtgtttgcggtcctttttgtgacaatttcttttagatgaaaatgcttttaatgaagcccttttggtacttgggagcctcactggaatggatttagtacaaacttgccttatttcaaatttatgttcaatattgaacaacactgttacccatatttaggacagtagacaggtaaaggttgcagaatttttatgaaatataaagcaatatccactgttataatgaagcactacataaaattgtataatacgtgagtttcttattcctcaaatagtctaactgattgttcattgggctcactcagccaaaagtagagggaaactttgtacagacatcattagtttttctccatttagagattaatcatgaagagctctggctctttaattctgtaatttgtatatttaatgggctgctgcagaatctatgacagtaattagcatagcctgaaaactcattaatacgcaacaacatgattaatgcagcattaatgcaaacatgactgaagttatttgggttatgtagtaagaagattaaagctaaaatgtcctgtttgttttaccagtggtgagtataatagagtggcaaaaaaataaaataaaaacaggtatcaaattagctgtttaaaaaaaagaaaaaaaccagcaaaatttaaatcaaggtgattttatttttcccttaggtctaaaatttgggatataagttatgttctttacttttatatttattcatttattcataaatttatcattactgaaggaaagttcattcaaccttttagtttaacatagttaaccttttagcagctttaacataatattattagtcttacattggaaacaattttaaattgtactaatctttgaccaatacattacacatttctgttttgaaactaatatatattattggctatgccaaataattaaaggatttgttcctacttattcagaagttacatattatgccctcttctcactgtgttcacctcttaaataaatgttcaaatactttataaaatactaccataaaactcatttttttaaacaaaactatcaaatatgacatgttaaatactgaaataatcaataatgtttggggatgtaaaagtatataagttttgcttgttcttgctgtctcatgtaatcatattgaagtcctctcattcttacttttttttggcttttcttttttgagacggagtctcactgtgtcgcccagactgcagtgcagtggcgccatctcggctcactgcaatctccacctcccgggttcaagcgattctcctgctcagcttcctgagtagttgggactacaggtgcccgccaccatgcccggctaatttttgtatttttagtggagacgaggccgggtgcggtggctcgcccttgtggtcctagcactttgggaggccgaggcgggtggatcatgaggtcaggagttcgagaccagcctggccaagatggtgaaaccccgtctctgctaacaatgcaagagattagctgggcgctgtggcgggagcctgtagtcccagctactcgggaggctgaggcaggagaatggcgtgaacccgggaggcggagcttgcagtgagctgagatcgcgccattgcactccagcctgggtgacagagcgagactccatcgctaaataaataaataaatacataaataatacagacggggtttcaccgtgttggccaggctggcctcaatctcctgacctcagatgatccatccaccttggcctcccaaagtgatgggattacaggcgtgagccacagtgcccagccattttttttttttttttttttttttttttttttgctatttagtatgacctgttttaatagcggtcctaaactttaaatgacttatttttcaatcttatagtcaaatgtcaagagtcattaatagtatctcaaacaaaacttgcattttaaggttaagcaatcctggatgactgaaaaaaatatgtatctgcttttttgtacttattttattctaaatccacattagaaaaatgtttatgattttattctttttcaataaaaaaaaacaagtgaatatccacgaagtacctgactcttggctaggtgttgaggaggaaaagcaaacccatcaatgtctgtgcacttggaaataaccatctgggagaagagaagctcctttcaacctagggatgtctatagataagaatgaaattgcaccatagaaagaaagcatatcaacattgcctgctaccaacagatggcactgttaatggtttgtatcacaactgtatttgtgggaccaatagatttgctaacattctcagaaggtagtctggaaggagaagagcctctgttaaggcagtgaaatgatatacatgctcaattttgtttaattatcttgtcaaaattcctggaaaaaaataaaaaaatatatttatatgggatatttcgtttaattaaaatacatcatcttttaccaaaattaatatatgtgaaattaaattgtagtagaactttaaaacaacatagagttcctattgctttgaataattggtctttacatttagtattatattatatgttatattgttatgtataccatatatataatgttatattatatactgtaatattagagtagcaactgatactcacaaagctaaacaactcagttccactgaaatataccagattttgacttagttttaaaagggaggacctagaaacagagagaaaatgcatcagtgggtaaaatcatttacctctaatgttttatttcacctctatggtttttagtgtactagagagctgtttaatcagaccattaccaaattgaataaatggctacttagtgattactgaactatttagtgatggggttggggagaactccttttttaaaaataagccttttgaatagttcatataagaccatcctaataaataaaatggaacagaatgtgtttgccatgtaatagcttagtgatttttaatttctgtattgtgatgaaacaaccagcttttctagaatgtagccagtcctttgtttctcagaagctgtgcacacttgcggcattcagtcctagtgctgccataacagagtttctaaacactagttcagaaatgagacatttttgtttagtctctgtttgggcacagccaagagtttaagactgtacatggagagaaacttgcttttttctgtggatgtaatccaggggacctgttgaggtctttaatgggtggctgacaggatgaactgggcattcaatattaaagggtggtatcatagcaagggggttaccccagcagagtttgtagatcaggaattgtttagagcctagatcttgggaaagtgaacaagaagcatgttaactaaagataaaaaacagaaaccaggtattgtctttttaaactctgagctcttggagtggcgatcatgtcttttccatattagtatctccagtgatgagcattgtctgttggagacactcaatatacatttcttgaatagagtaaggatttactggactttgacacagaactaaggttctgtgtgatagaggtctgtgtgcttatgagaagctggactgtgtaggtgaggatgctaaggctcctgttcccatagagaagtccttgagatggctcaagctgctggttcccttttttcttggactttgcaggtattcaaggtgtctctagttagaagctttatgttttgtaatgggtaaaaatagtgctaaaatatatagctctttgctatttataccaaattgagggtctctcagaacaaatacagtggacggattttaataataatagctaatacttatatagggccaaatagttctgagtacttttcatgtatttaactcatttaatcctcccaaaagacttgtgaaagaagaaactctcgttgcccacttctagaggaggatattaggtgtagaaaagttaaacgatttgtccaaagttacatataaattaagtgcagaagctagtttttgaaagcttggctctagcatttgttttttaatcattaagccaaacatcaaattccccttcccacactttttttttcacttttaccaaagaaatatcttaacaaaatgactcctttggaggaggaatacatgcatatatatatctgtgtatacatgcatatatatatctatatatgtgtatacatgcatatatatatctgtgtgtgtatatatatatctgtgtatatatatatacatatatatatgtgtgtctgtgtgtgtatgtgtgtctgtgtttctgtgtgtatatgaggtcagagtgagggccaagaagctattttttctctaaagtggttcatatattgcaagtgatttaattgagggaagatatagttgtattagctaaaacacttaaaagtttataaataggtgtgtctacacaaaggcaaacattcctctaatttctaaacagtttttacttctattgaattgaatatgcctaatattttagtgtcctgatgattaaagtatgaggaatgaattaataaccaggttcaaatatgtgtattgttaccatgcagatctgttaatacttattaattcccacatcagtgtgaactaaggaaaatgaaattaagttgcattaagaatgtgctcagttatatataaagatttacttcctgtaagagtgattatataattatatggtttactaaaatagttatgagattttattctttcattcatttgacatgcattattggaatcttagtattttcaaactacgtatttggagataaatattgcagtctgaccataatgatagtttaggtattccttggcctggaaggaggacactagttcattttattaacatgttctttgtctgtggagagcctccacaatgccattttagtaaaatactggatctttactaaaccatggctaccaaagacaaagtgtcattctaggcagccaacagacttcttgccctactcctgacaagcaaaataaaatagcctggggtaagagaggtaatggccatgagttaagtcattttcatagttatgctaaatcagcttccctcaggagcacccccttcctttcctttctctgtttaaatgaggtggagtatgatgtgactattccagcacactcaaaattagatgtgtgatcaagtattgatcttcaggaagttcctaatcctgtctgatgttttctgtgttagctttttttttccttctgtcataatgttagattagccagcaccttcattttgttattcccttactttttaaggcaggattcttctgtacaagaaccctgaagcgaccctaatattgtatccaaaatgtagggtcagaatcaggagtggagactgtgagttcattgtgagttaacagtctattatttaaaagtgcaacaagaaaaatagttttgctttcattccatttctgggactctaattttttccaagggagtctggcataaagtatcgtattggtccaattgcttgggatccactgagattgttactagagagggctttggtgtaaaaccccagagtaaaattctttaatgtccttttgggtcattgaacactttctaccattatgcttgacatggacaccattgaaatcattccaaggtcaaggtcactcagcaattttactaatgcttcaagttagtggaattttatttttccccccataatgcttgttttacaaaataaaatacagtatattttagtagatattgtaagatcaatttttgaaatttcttttatcaaaataaatataaattttatgaagtatctgtatgtttattatatgtaaacgtgcaattacaaatatgaaatataatttatatacatgtatctatgcatgcacctggatcttatttgaggtataaaacatgaaactagaactaatgtgttttacaaatatacgtaaaaagttattatttttttaattttatagaaacacagagtaagtaatgataaaaattcatttgtattaaaaatatttttataactacaattagtactaacattttgctttagcctaagcttaaatgctttatttgctagagtcacttgttaaaatactaaaaattttacaaggtatgaaggtaaaatagaaattatttcaaaaaaacaaaaatgcatgctgaattttctcttttcctttataaaacaagcaagtcctttatgtagatttctacaattcataattcaatgtcattaaatggcattcaatttatattttagactattatgatttcaatttgagacacaattgttttccaaatgaattcaatgtggggtatatttatgtaatagatgaaatgtatttcatctattttggaattgaataaattcaatttattcaattgtttggaattgaataaatacagtacgtataaagggaggatgaaaatgtacaactattggatgttgatagaagcattctgaataagaagcatttttacaataaactcaagtatatttttataatgtactttttaataatacactgattttaaaagtcttttttataatgtactttcatatattttttcttgagaaatcttgatcttgtattgacaattgcataaatatatttgtgcccagcacaatggcttacgcctgtaatcctagcactttgggaagctgaagagggagaattgcttagtccaggagttctagaccagcctgggcactgtggtgagaccctgtttctacaaaaaagtcttttaaaaattagctgggtgtgatggcacatgcttgtagtcccagctactcaggaggctgaggtgggagaattgctgaggattgtttgagttcaggaggtcaatgatgcagtgagctatgatcacgccactacactcaagccttacaacagagaaagaccttgtctcaaacaaaacaaaacaaaacaaaacaaaacaaaacaaaaataaataaatatcttggtatgtaagggcaatttggggttgataatttggagagggatggaaagatacatagatgcctatatctacatagatagagctctctctatacatacggatacagatataaatagatatctatatgcagatagatatatatctatgaaaatacacatctaaataaccatagatatctattaatatctatgtatctgtatctatctatacattttaacttaaaactttatatacacataagcctatagttctatatttgtagctaagtttaaaaagctattcaagggaagccctgagttgttcttttatggcatctggtggcatttcatatttgacgtgttggttgctattggtgtttgcactggtgaatccttccactggaaatttcatttcttcagggtttaccaatcacctaaaatgttttctttctggataatatcccctgactgctttcttcctcttttagcctaaagtttcctaaaaatttaaaatgcattgtagtcagctttacttacctttcacagaatagcaactcaagaagtgtatgctaagaggaggaataaaattatgtaaaaaatgaactagaaacatagttacctaagacaaaaataataagtggacaaaccaagagtaaacattttacttaagggtttaaaaatgatatcaatttttactagttagggacaatgaataatgcttatcacctccactgttatttagtgttgttctggatgatataacccatgtgtaatgacagaaaaaagaattatggctgttgaaaaggaatagatgaaatttccagaaaataagtttatacctaaaaaagccatcaaaacctattataaataacagaagtacaataagatggttagctataaataaatacataaaaataaatattttttccataattcagcaataacaaatctgaaaatgatctgattcttaatatcaattaaatatataataagtactatagcttaacaagaaatgtgcaggatctatttaaggaaaagagaaaagaagaacttataataatcattttaatacaaaagagtgaattagttgataggtagctaaaagcagaattttaaaaatttactaaaaaaagcaattttgtaagtaaatttgtaagtaagaaagaaaactggaatatatccctatctcactttacatgtcaaaataaattacaaattttatatttaatactttattttttccagaaaattaaatataaaaatacagaaaatgaacagaaaaaatataagtaagttacaaattctgggctaggaagcccaattataaaaagcaaaggaagacgccattattgaaaacatttagattttaaaacaaaaataaaccccctttttacatttaaaaataacatttaaaagtcaattgttaaaaaaaagtaaatgactttaacaagtgacagacaaagaaaccatacccttaatgtggaaaaaacgcttacagatcaataataaggatgcacaaatgacaaaaaagtatccaaatgaagaactacgatgaaagttcaaaatcactattcatcttgtaaatacaaattaaaactagaataagatttcattttaaatctatcgaatactagttggcgtctttcagaaatgccaggccaaactattcctgatgctagaaatgttttgcctgacagtggctgaaaactatttataacatatggaaaggaaattacacaacttgagaaatttcttgcagtgaactcagaaatgaaaaggcggttagatgacaatttcagttcattaatttataaattcacatgctaccacagattttagagatcatgcaattcagtatctccatttaagagtaggaatctatgggctattctgctcaggaaatcagcactatagcatgtatatgtatttcataaagtatctggtggatattactttcttgttttgtttttttttttttttttttatcatttggaggttgtaaagcatgatcagtccttataagggtcacatttagacagctacagattttaatcgttccaaggaaggaatgggggattatttcaaaagacgaaagaaaacattctttgatctaaaagcagaaccaccatttgacccagcaatcccattactgggtatatacccagaagaatataaatcattctaccctaaggacacatgctcgcgggtgttcattgcagcactatttacaatagcaaagacatagaatcaacctaaatgcccatcaatgacagactagataaagaaaatgtggtacatatacagcatgagataccatgcaaacatgaaaaaaaacaagatcatgtcttttgcaggaacatagagctggaggccattaccgttagcaaactaatgcaggaacagaaatctaaatactgcacattctcacttataagtgggagttaaataatgagaactcatgaacacaaaggaacaacagacactggggtctatctgagggtgaagggaggcagaagggagaggagcagaaaagataattattgggtattaggcttaattcttgtataatgaaatcatctgttcattgaacccccgtgacacaaattcatgtatgtaacaaaccttcacatgtaccccacaacctaaaataaaagtttttataaaacacatttctttgttttatacagaccagaatgaaatcatttctcaacacttcttttacattaaagcacattattcttgtttttttcctcaggtattgccctactttttaatcctaatctatagttccattgtaatttttagaatgctaatctaatatttattgaattcttttgtagtaagcaactgaaaaaaatttaattttcaaaaggaagaaaaaatacatgtttaaataataagataacacaactttggtattctaaggaatgtttggggattcattccagggcgctcatattttcaggttagctttcaactgttattttgtcgagtataatcaatggagattttgttattcatgtatttatagagctggttagccataaatagtttatgaatggagacatttctagcaccacctaatggcagtcaagtaaaaagaaaaagtttttctaatttaggaactgttttgcataatttaaattaaactatatagccagagttacttccatatgaaaatgaacttttacattccctaatgcactaactaggcatggaaatccatctctgagcaattggattgagtaggaatgaagctgaagggatatttgataatgaaaccaaggggtttctgctgtctttatgtgtgcaagaataagaaaatacctagctaatagaataaattaattttatgtgaaaattttctttttagtttcagaagcctatgcatactagattttccatactgtagtttcctgaaaaaagtatattttgagtattgtattggcatattttatttgtcttgtttttcagcagttatttatacatctttgaccaatttattctactagtttaataaagcgttttttaaagtttctgatagtttttttaaactgagtcatatcattctgattataatattggaattttctgttgaatatgagtcaaagaacatgctttagatccgtaagctctactcatttatttcatgtgtttcctagcaggatttgaagaatgtgttgtctgtcataaccctaggattgagatcaatggatttggttaatgtatccgaaggagaaggagaacttagcgatagcagcagattctgacacctttcatcctcgtctcaacactttggtttgatactttcttctatgatataaacagggaatactaggcagactgcagatacaggtagttttttgtttgtttatttgtttgtttgtttttgagatggagtctcactcagtcacccaggctagagtgcagtggcacgatctcggctcactgcaacctccaacctccgcctccaggattcaagtgtttaccttgccgcaacctcctgagtagctgggattacaagtgtgccaacgagcccaactaatttttgtatttttggtagagatggggtttcaccatgttggctaggctagtctcaaactcctgacctaaagtgatccgcttgccttgacctcccaaagtgctgggattacaggcgtgagccaccatgcccggccagatacaggtagttataaaaatcaacaagaaagagacagtctggtggtggtagtagtttcaagaaagtgctttctcttcgactgcaatttcttcctttctatgaacatttatttattgatgccctgtaatgcccttcacttctttgtgcacacactgaattttaattcagtcttcacagtcctgcttaaccatcacagcttctgtgaactttttctgtatatcattttgctctcatttcaacaaaattaatcacttttgctattttatagctgtagattacatatccctcttgtactgggtctttataatattttgtactcatttggatacaaatacttctactgctataggatgggtttcccttaaagtaagtattatgcctttcttgtttatctttattattcagagcaaacatgtattttggtgaaagcaaaggcaagttaatggaactgatgtatctttaagttattgtctactgtttattttctctagttttatgttttaatgtaggctgatgttttcatttcttcctttcattaatccatttctttattactgctaaaagttaactagtatttgttgttagttttttgttttcttttgttttagagacagggtctcactatgtcactatcttgcccaggctgtactcaaactccttggttcaagccatcctcctgccttggactcccaaatagctgagactataggcatatgacactgtgcctggctgggtttttgttttgttttgttttgttttgtttttgttatttttaacatcatatgatacttgattgacttttctaaacccgtggattaatatctgcttctaaagtaaaaaattgttaaccttgttattgaaagctagaaagagaaaatgtctggcttaaaggctatcctaaatttttgaaaaattcttatgagaatataatcatctatataaagggtacatttggaaaatacaggtatatctttaagaaagattcagaatttacaagaaaaaatattgaatatgaagatgattagacaattgaacaaatatgtagataaatacatcaatttttacaaaacatgaaatagcattaaaaagagaagaatttatcactgctatcacttatcactgttgcagaggtccgattaatgcagtaagaaataggagtttaaaagttggacataaattgatcagataattattattttctgataatatttcctgtaaaatccaagataatccactgaaaatatagaaccagttgaacaatctacaaattgactggagtcaagagaaatatatataaaacagttgcattcctgttctcacaaaattactcataaaataattagaaacttctgtttcaaattgggatgtagaacagtaagaaagaacttcgctttcatggtaacaacaagaaaaccagactaaagaaatatctttttctatgagtctgtcaaggagcaagcaatgcagaaaaccctggctgaattgaattttaggaagaaataagtgcttcataggtgatcagagtgctgtggcagcttccatatctgaggctaaacacttgttcagacagcggaggagtatgctattgtagatggggagaatttttaaggtcaaggggaaaccatccacccttagacaacaatgtagcctagtaagatgaaattagatctaaaagtctaaatgccaaagcaagtagctcagccccaggttacactattatcctccacacttgaattttgctaagataaagtcagttgaagaggccctagaagtggattcctatgaaattttgccatgattggattccagaattatgaataaatttaatccaaatatgagccaaaaatatttatagtcccagccaagtcccccgctagctcaaatgaggataagatccaaaaggtggcatcaccaatggttgaaggttgagctaaacacaagtgaactaaatacaattaaagcccaacttcagttctacataagtcagtagaaatgtatccacagattgccaaattactgtaattagaaagcaaagaatttaaagcaaatattgtaaacatttaaaaaaaattaaaggtaaaattcatataatggatgaaaagataaaatattttaagagataaatgatagctctaagaagaaataaaatggaaattctagatctgaaaagtataaatttacaataaaaactttattggataagtataatagcaaattggtcagtgcagaataaaagattaatgaatttaaacacatatcattatgaagtaaccaaagaaaaatgaagagaaaaataggttaaaaaataaacagatcgataacatgtggaataatatcaggagatttaacatacatggagatgtgggttccaggaagaagaaataggcagaaaaatatttgaagaaataactgttgctaaatattcaaatttgatgatgaaacaacctaaaaatgcaagaagctcaatgaattccaagtagaataagtataatatagccacatattgtatactcacagtccgattactaaaaaaaaaagattatggaaataaaaaccttaaaatcagctagagaaaaggaaaaaggcactacatagaagaaaacaatgaaatgaatgaaggctaacatttcatcaaaaataattgaggctagaagataatacaatatctttagaaactttaaaacaccaatctcaattctatattcagtgaacgtattattcaaaaataatttgaaagacatttttagattaaagaaagagttagtatatcatgaatagtcttgcattacaagaagtgctaaaaaaagttttaggctaaaaataccaataataactcaagtgtgaggaaaaaatgaaggaaaatggaaattaaaaatgtgaataaacagaaaatattattaaaaactcttttgaagacatttgattagtgaaaacaagaaattttaaacatattctgcagtttacaacatatataaaattaaactgtataaaaaatagtacaaataattggacaatggtaaatggaagtatgttgctgtaaggatcttatatgtgaagtagtataatgttaatttgtgatagtatgtgtgttaagaatgcatatgatgatccttagagagccattttaaaaagtctaaagtctacctagggagatgaaaaaggtagcaaaatggaatgttaaggtaactcctctaatccataacaaggtagggaaggcacagcaaagaagcaaacagcaaatgcaaaaaaaaaaaagaagaagaaagtaagaaaagagagaattcaaatagcaagatggtaaaattaagttaaaaacatattaataattatgttgaatataaatgcacataacacaacaatcaaaaagaatagattattaaactggctaaataagcaagacttacaaagggtgtacaagaaacacacttcaagtataaaaacataaaaagcttaaaagtaaaaggatggaaaaaataaaccatgaaacatttatcataagaaaatggtagtggcaatatttatatcagccaaaattacctttaagaccagtaatattactaaacagacattttataatgatagtcaattgattaagaagaaattatcctaaatgtgcttatatgtagtaatagagtttcaaaatacataaagcagaagtttacaaaccaaaggacaaaatagacaaattcccttctatatttcaagatttttaaatgactttcttagtacttaataaaagaagttgataaaaatctataaaaatacagaaaaatcaaacacactatcaacaaacttcagtgacagttattgtacattctatacaaaactggaaaatagctattgtttttcaaatgtacatggaaagtatgtatatttgaaagtatgtacactacaaacattctacagctaatatgctgggccataaaagaatcttaatatatttaaaaagttgaagtcagaatatattctctgtttatatagaattaaattagaaatcagtctgaaaatgctatctggaaattttctaaatacttcaaattaaacaacacatttctaaatgccctaccaattaaggggaattttttaacaaaaaataaagtataacatgaactttttggaatgcaccccaagtaaggcctggagagaaatgtataggttaaatggttatcttagaagaaaaaagtccaagctttcctaagcttcttcttaaaacaggcaaaaaagaacaaattaagaccaaagtaataagaaatgaaaaaaattaaggcagaattggatatcaatgaaatggaaacagaaagcaaagcccagaattgatttgcaagaattatgggtgttggggaatggagagtggtaaggggagagaaggaggggggagagagaaaaggagaggaagagagagaaaaaaatattttggattaattttaaaaatctatcgatatgatttaccacattaatagaggaaatagtatagcaaaatatcatattatctcaatacagctgaaagacatttcacaaaattttatacctattcataatgaaaactttcagcaaactaagaataggagagatgaaggaccactacaaatattctacagaatacatatacatatatatatatatagtatacatatatgaaatgtacactacaaatattctacagctaatatgctgggccgtaaaacaggcaaaatatatatacaatatatatttaatatatatttattatatatacttatacatacttaatatacttatatatttatatatataaatatataaaagtgaaatagtgcatgttttgattttaagatagggatcaagttttcgttcaaactttaccagtagttctagccactgctaaaacaatacgataatataaaagtcataaatatagaaaaggaaaagaaaatgtatttgtcatcgacataattttgtatgtaaatgctttaaaaaatctttgaaaaagtgttaaaactaataaatgaacttggaaagattgcagaatacaatgttaatataaacaaaattaattgaacatactagcaataaacaatttaaacaaagttggatttaaaagaatattcaaaacatagcacttaaatttaacaaaataaatgaaaatatttgtatagccaaagctataaaacataacttagaaaaatcaatgtaaacctaaatagatgaagatttatcatgtttgtggatgaaaaacaaaatattgttaaaatagccattttcctgaagtcaatttattcatttaatgtaattccaatcaaaattccagcaagcttttttgaagaaattcccaagttgattctacaagttgaaagacctagaatatccaaaatactattgaataaagtattaaaaaaatggcaaactgagccatcttatttcaagatttaaaataaagccataataattaagacttcatagtatttgtactggcaaattaatcagaaatagactcagacttccaatgtcaattaaaatttgatagaggtaaggcagttcaatggggcgagtacaatcttttcaacaaatagtactgtatagtgtataggagtcaaaaaaaaacaataaagcttgacccctatctcacatcatgcatacaatttaatttgagatgggttcatagacctaataaataaaagctgaaattataaagcttctagaagataaatgagaaaatatcttgatcatcttggtgttggtaaagatttctcagacaaggtacaaacaaagcgctaaccattaaaaaatggtaaattcaacttcatctaaaatattaagaaaatgattgccattctaactgatgtgagatggtatctcattatggttttgatttgcatttctctgatggccagtgatgaagagcattttttcatgtgtctgttggctgcataaatgtcttcttttgagaagtatgtgttcatatccttcgcccactttttgatggggttgtttgtttctttcttgtaaatttgtttgattctggatattagccctttgtcagatgagtagattgcaaaaaatttctcccattctgtaggttgcctgttcactctgatggtagtttcttttgctgtgcagaagctctttagtttaattagatcccatttgtcaattttggcttttgttgccattgctttttgtgttttagacatgaagtccttgcccatgcctatgtcctgaatggtattgcctaggttttcttctagggtttttatgcttttaggtctaacatttaagtctttaatccatcttgaattaatttttgtataaggtgtaaggaagggatccagtttcagctttctacatatggctagccagttttcccagcaccatttatttaatagtgaatcctttccccatttcttattttcgtcaggtttgtcaaagatcagatggttgtacatatgtggcattatttctgaaggctctgttctgttccattggtctatgtccaacaatgacagactggattaagaaaatgtggtgcatatacaccatgaaatactatgcagccataaaaaatgatgagttcatgtcctttgtagggacatggatgaagctggaaaccatcattctcagcaaactatcgcaaggacaaaaaaccaaacaccgcatgttctcactcataggtgggaattgaacaatgagaacacatggacacaggaaggggaacatcacacaccagggcctgttgtggggtggggggaggagggagggaaagcatttggagatatacctaatgtaaatgatgagttaatgggtgcagcacaccaacatgacacatatatgcatatgtaacaaacctgcacgttgtgcacatgtaccctaaaacttaaagtataaaaaaaaagaatcaaaactttaaattaaaaaaaaaatgaaaaggtaagtcaaagactggattcggctaggtatatgtttaacttagagaatgccaagcagttttccaaaatgattgtttaattttgcctttacattagcatgtatgagagtttccattgcatcacctattcagcagattttggtgtttttaatttgaccaattctagtgagtatggagatgtgtctcattgtagttttaatttgcagttcctggatgaatgatgacactgaacatctttctcatgagcaaatatggttatttgcatatcagaatttttagtcaagtgattgtttagacgttttgctcattttctattgggttgcttggctttttattgagttgtaggatttttttatgtattctacatgtccattgtaagaatttaaatttctgataaaagattaaaaaaatctatagtaactttttagcagctttttcattcatactagggacttgtattacaggttccttctcttgatttggattttggaaggcaaaattttcatcagctgaaatgtattagttcttgatttctttttgttcttacaatagctttgtatggctattacttgacaatttccaatcattttgaaatgtcttacattttcctgtatctgcaataacaaagttaagttgacagggataaaggcttttggatggctttttatgtttcttagttcaagagagacacatttggtttttgaaaaatgtttgtgttgaagtctaacatacatacagaaaagtgcaaaaagtagcagtgtgcaggttgacccatttttataacccggatagccttgtgtacccagcacccacagtacaaaatagaacactactgggcccccagtgggcctgccttgtgccctttctaaatcccagccaggattacctctatccagacttctaacatcatacgtggatttttgtctagttttgaacttgatataaatgggatcatacagtatatattcctgtgtacttagtatctcttacacaatccatgtttgtgagattcatgtatatagttgttcattctcattgctatatctgttgtttgtacagttgagtgacacgtgtgtatgtttcagtttgaaggtgtaatgaaaggtcttgctgtaaacatacttgtatatcttgtgaccctatgcatttgggtggggctggatgtagatccaggagtagaacggctggatgaaaacatacatatatcaaaagatacaagggtaacttttttgtttgtttttgagacggaatctcgttctgtcgcccaggctggagtgcagtggcgcgatctccactcactgcaagctccgcctttcgggttcacaccattctcctggctcagcctcccgagtagctgggactacaggcgcccgccacgacgcccggctaatttttttgtacttttagtagagacgaggtttcgccgtgttatccaggatggtctcggtctcctgacctcgtgatccgcctgcctcggcctcccaaagtgctgggattacaggcgtgagccactgtgcccggcccacaagtataacttaataaatactgtcagtttttaaaagaggttgtacgctccaactagtagtttatgaatgttgcatgtatagatattattacattatatattataaatttaacattttactttttaatttaatattatatataaaaatatatgtaatatatacgtgtgtgtatgtgtacatacacacatatacagtagttgcacatatttggctacactttgtgtttccttttcattttagccattctaatggatatttagtggtattgcatttcattttgcatttctcagatgactaatgataccgaccatctttttcatattttttttttctggctatgtatcttggtatcagatatatgtattgcaaatatctgctttcactatgtcatttgtcttttcattctcttattcataccttttgatagccaaaagttgttaattctaacatggtctaatttatcaacttttccctttatgttatagcttcacatttatcgtttaagaattctttgcctaatccatggccccgaacgtgtatgatttttatgattaaattttaaagttgtaaacctcttacttgaaagttaaatatttccatgtagaacttggatttttcatatttttagaatgttaggccatggatgtaagtttattttacacatctcatgtataccatttgtacaaagtatgtgttccttaaatatttcctgaatgaatgaatatagagatgcatgaaatgctctattgtttaaacactagaaaccaaaacactgaactttagaacatttcctgtctcattttttgaaaatcaaagtctaaatttcagaaagtgagaaaagtataattttcacttgtctgcccattttagtcagtgtttcagcttaacacaaacattaaaagcaaaaatattttggcactgctgggctctgatccacagctcttcttattcctgggcccaggatgataacacattcatgaggcagaggggaagacaagttcaactacacagctgtattaaaatttctgctctcctgcgcacaccgcatgtccactttcatttctttggccaacacaagtcacatcactaagcctaagtcaatagttgggaatctgtaaatacataatcttcttataggaaaagagagtgttaataattttgaatagttatgcatgttaccattctgtctcacggtagagtcagtaatgttttctttaaaatgttttatatgttaatcaaaatattatgtttatatttaaatgtattcttttttatttagttcatttaaagaattgattacatgatttcagcatttggctcaaaagatagaatttatctatatctatggcaataattaattgtcaagaatatgtttcagtgaacgtgtgcatttttaattttgtcatagattttgcacaaaagacattcattatttattttggcagtgtaaagagaaaaatgagaagattaaattatttggaaaatgctgtgggaaagtctcacatacaccatcaattccaattgcctttttttatactatagcttcccttcttaagaaattttccttgatctgtgtaaaatattatattttagttgcactagcagtgcattttctcatataagcataaaacttgaaaattaaataatatattttagaaaaacacacgaacttgcatatttcttaaatagtgcataatttttatgagattcccacgtatatcttgtctaaatattcctgtaattcttactgatttattttcattcatcagatttctcttgaattaaagacaagtagttgtcttcccagattgagcaattattgatatcttccaacacccaattccttgtttttattctcctctctactgccacatagatgactccaacacactggtagagagttttgctctcttcatgttccaaattatagcatttttgtgaaataacctcaagctgagtaattttataggaataggttttattataatatatgataccaaatatcacataaaaagtggtgacagaaagataagatttctcaagtagtgttactctgaaccataaggagagaagcttaagagaagaaaagagttggtagaaatataattgttctctgctcaggttgtagaccagactctacgtctatgtttctgctggtagatgcttccttttatctccctggtctaccctgataattaatttatatgtctcccatttctttctctatcagatttttctaattcgtgttctgtacccaccttctactcattcatttcctcagtccttatcacccagcagtcaagagtctgtccattctacttaactgaaaaagattatgtcattaccagctccgtaagtttttcttcagttctaattattctggacctattggaagtgtttacacagttaactaaccttgcctccttaaagttccctcctatctagatttccattttacaatattatcttgatctaactttattcttgcccttgtttttttcttttctgaaatgtggacatttccattaaaggctcttgttctttttctacaatctgtctcttagacatggcttttgataggtgattgccaatgtattttcctagcatcgtcttctcttctaagatttagtttctcatttccaaatggcaggcagagttttctgcatcataagttcagtatgcctaaaactaaagataattcctaaccccagatttccttccttatctgacatttctatttctgttattaatgccccattttcctcaataattggtgaaaagaatggaccattttgccccacaccatcacctcatatcaatatgtcttaatgtgcctttcctggtatgtatagagtttatcctttcaattactaattcagttacttgtctgtccttgtcttattctcccaaagcacagcactcacctcttttctgtgtagctaagttacgtctcctccctacatttcatcatgaattttgttgccttagtctcaattttgaaaatcctattcctgctctccactcaaattttaatttcttccattaatttatgggatatgtttcaaatgggtggctcaatcatttcagtgcacttaataggggagatgagagagaacaatacatctagtagcaggagtccaagtgtgtttgactactgaaaagcaatttgttggggcaaacaattctattctgtggagtggaagagttgccaggaaggactgcatcctgaatctgacagcaagaacacaacattcaagcaggccagagtaagagaagaagagagtgtgtaacaatgagaaataaaaatcactaggacaagtttgttgaaaatgaccaagagcataaaacgtagaagatggagatgcagaagtcaagaaggccaggataaatttgatttgccttcttggaaagtctaaagcttgtatcctaaacttaacctttgctgtgactaaaggaatagcactctaaaaatgacttagaacacagcattctttttcatctttgtcttctatacaaacttctcaagccagattgtacagatgtggtctcacctatttctccagatttatctaactgtctccctcacaaccagccttcctcaaactttccatacctctaggactttgtacaattcccgccaaatccttcatattctctaaaaacaagctgaagtactatattatctaaaactgtcctcaatttcttttaatcaggtattttgtatacatccctataccatttatcacattgcattacatttttttaattgtcttttttctcaactagaactcaatgtcagttatgggcttattagtttttcttctttgctgtgtatcggagtactattcaacaaatgttagtgttccatagatgtatgttgaaaaaacgacagtccaatgttcaccaaatgatatctgctttcctgccttcaaatcctagctaaagtttttctcttcagacatggcttctggagtagttgctgtctattgaaactgagttaaccaccacccacctatgtagggcttttggttaccagcccagcctgaaggaagatctccttcctttaaatttttattatcctgcctgactgtatttttactcaaatcagtattcattcattattcactattgtgttcttgagatgttatttgattttcatatatggtcttgagctcttatttgattccacaggataatttgttaagacatatacatttaatattttcaactaaactggaaattccttgaaaacagagattgtgtctcttaccagttttaatgcattaagcaaaaagccttatacagggcaagagctccacagtatgtgttgagtacgtgggatactgagtagagtggagatggggccatgtaatggtaggactggagatggggccatgtaatggtagggggaaggcatcattcataggactggagatggggccatgtaacggtagggggaaggcatcattcataggactggagatggggccatgtaatggtagggcgaaggcatcattcatagggctggagatggggacatgtaaaggtaggggggaggcatcattcataggactggagatggggccatgtaatggtaggggggtgacatcattcatagggctggagatggggacatgtaatggtagggagaaggcatcattcatagggctgttgcatattgcccctgcttcctaagctgtggaaatttctatgagaaaagagcattgtatatcctatgatatgcagggctagtatgtgctctgaagggtcagtaaagatcccaaaattctgaaggctgcaaaccatttggttatagggtggtgtttcaggaaattacctctataggcctcttcatggcaggtctttccaatattaacttctattactgaaccgattctttaaacttcataaatattttaagcaagaccctctgtgtttctttcactcttgtcaaaaacccatttatttttatgactctctgataatgttttcacattgatactctgagtatccaattttgggttgacaatatgtctttttgggttgatgagttttgcataaatttaaacttcattatatattgattagcaggaatgtgggcataagattccaagtactgaatggcatttaaaatgggatatatttaaaaccaaatggcctagaccatgcgagtatattgctgtgtataatttcctgactgtactcactacatcataaataataatgaaagtaaatgtacatttatcagaaagaatcaacaaaaccccagcactgatttgctgatcacacttgtcttaccaggcattaaggccagctttcgaacaaaagtgcctgaaggtttgattgtctttgcagcatcacctggcaatcaggaagagtattttgcacttcagttgaagaagggacgtctttattttctttttgatcctcaggtaaatgagaaatcataaactttaatatttttaagaatttagtaggtgcctggtactgaggtaaatgcttctgttttcacactgaatcttcattcaaaccttgtaaggtaagtactattattatccccattttgccaatcaagaaaatgaaacttacaaaagtaatgtgacttgccctcagctaaaatagcggagctaacttttaaaccatcatggtctgactgagaatctgtgggcttaacaaccaaaatgccaccttataatgaagattaaaacttttaaataaatttaaagagatctatttttatttttcttagtagcaaaaaatcatgtccccttttcttccttccctgtctttcttttttcattgtttcaccagcaaatatttaagtggctatcgggtactatggtactgggcgttgcagactaccatagtttcaaagttaaatatgaccatgcccctgcaaaggatacagtaaaataatcaatttaaaattcttataaattgtatcaaaataaagatttaggattctatgtattataggaacataaaataaagaaataaattgttttctgagttgtcaattttctctggaaatgtgatatttaactgagatacaaatcaatgaagaaaagttggtcaggacaagattatatgtctgtatttgagggtgtatatttcaggtggggcagtacaggggagattctgatctccacctgggaaggtgctgagcataaagtttccaggcaaagtgagcagcaaatattaaggaaatagcaaatattaagtgcctgaggtggacgagaacatggcacattcagtacactgagatgaatctcttatggctgggaacagagacaaagggaaaggtggtagattgaaaagctgggtagaaaccaagtcatttaagaccttgtaagcaaatgtgaggatatgaatttttcctaagggcagtgagaaagcactgaacagttgtcttcacttgagttgaacaaatatcagtgagcatttgatattaggtattgtattaagcatgtgagatgagtaagagaaatgagtaagactaagtaaaatatattagctttccattttctcagttcttcaacttaaaactgatgatctaaatcacacgttatgcttgacaaataaatgttttacattttattggtaaagcagacacaacgttcaccctctgtatccaagttgcgtctaggatcatggactgagtgatctgactgaggatctcagcctcatgaaccctggagatccattgaccttagagagaaaaggcagggcctattgtaccaagtgtatctgaggaccctgccagactcaaaaagcaggccaaagtcctcctgctttatgaagctgggagagccgcacagtggccactcgaaggaccagggacagaaaggctccctcctcatgacttgacagggctctgctaactccctggctggtgcacagcaggtcctcagacacaaagatttctgagcgtcccctagtaatgcagcttcttaaaggatgccagcaggtgggcagtgagtaagcaaaaggaaatagcatcacacctaagcagatcctgcagccagagggaaaggaagaagcagcagctatcgcagaaggcaagacagatggcaactgaaaaaaatttttaaaaaatcagctgaagttgattcaattacataatggaagatattattttttatttgaaaactttaagtagattaattagaggagagacactgagcctcagattagtaggtcagaagattaagttgaagaaatctctcaaaatacataaaaatgtgacaaaaacaagaaagttagatactactactgtcactaagaagcgaatcggaaggagaacaaaaagcacatgctcaagaaaaagagggataacataaaatgatgaaacaaaaaataggagagaatatctgatttaagagggaatttagtataaatccattgaaaagactcatcaatttcctgtcaagattaagcaaaactaatacttctatgagacctctttgtgccaggcattattctaagtggtctctctatacatcagtttgtacacttacatacacacatatgcctatacacacacacacacacacacacacctacacacgcacataaactcatttgaacttttcaacaactctgtgaggtagatactcttcatattcccattttacaggtgaggaatctgggccacaggtaagttaattttccccaagtcacaacactaataagtgaccaagccaggttataaacacaagcaattgagctccaaagaccatgattttagctacagtgctatactgcttttcaacatgaaagaaagatggttgttgatatccataaattcagaaaaaaaaaatccatctctgcaccaggttggaaagaaatatttcagtaagtaatctagccaaaaggaaaaataacagagtcagaaatataaaaagaagaagcatcagtgaataataaatctagtaatattaagttatgcctaaatatttaatgatagagtgactagaactctgttttacagtgccaaatgagaatctttgaaatagaagagaagtatagcaaaggcaagaaaaaaaacgtgaataatcatttgttgctaaaattagtaagatttgaaggagaggaaagatgagtgaattaaaagttctgaagataccagcttagtggcggggtgtgggtggaataagggaatagattatactgacgttttgttttcgttaaataaatagggcaaatgtttgatttcaaatgttatagaaaaataagttactactaataaaaagtgctcttcaggacatccaaattaacaaggttaaaaaggacagcaaatgctaagttaaaaaatcaacaaaaatcagaaaaagaaaggggagagtacagtaaaatagaagactgtcaatgagaaagaaaaatctggctctgctttttccccttcaacctgttagtatctggagatatttaagaagaagccagatggaaaaaaaactaatcacaggaccacttgtttatagagctttaaagtatacaaagtgagttcctgttaatgatctcatttcattcttgaagtagccccttgaggttgattttgttttcatccctgctttagatgaagtggcttaactacggtcatagagtggtttagggatagaactagcactgaattcaattatttgaatagcactgaattattttattcaatgaaactttgctaagaatttattggacttcacagttatgcactgggaacacagaaatgaacagaatgacactcattggaattctggccattggttgttcatcacagattttgagtatttatagccacccccctaccaaacatgggacagtcattggagaattaatccaaaaatgatttccccaagtctgaagcatgactgccatctcttttgacatgtggtgttgctatttctaaaggatgcgataccttaagactctgtaggataggagggtaaaggggtcaaactgcttaacggagaatggctgccaggaaactcatctggcaggtctagttgttttcatatcctttacggtgatcacctggacaggctggtgcaaagcgtggtaacagaattcagggaaacattcacagggcatttgcccatcatttccgcccccttacccttctcattcacacaattgcttagagtactcgtcactgctattagttttcccagttgctctgtccctaccctgtatagccaaaccctaagctgtatacatagtccgcaggtgccagccaagtattaataaaattgttaaagccactgggcgtggtggctcatgcctgtaatcctagcactttgggaggctgaggcgggtggatcacaaggtcaggagttcaagaccagcctggctaagatggtgaaaccccgtttctactaaaaatacaaaacttagctgggcgtggtggcaggtgcctgtaatccccgctactcgggagactgaggcagagaattgcttgaacccgggaggcagaggttacagtgagccgagactgagccactgcactccaacctgggtgacagagtgagaccttgtctcaaaaaaaaaaaaattgttaaagccaagttgggggctaaagggagtgaggaaggtttaatgatgtctagtaagtaaatttttatctgaaataatctctctccataaggtaaaactgcttgagttttcaggaaagtgacaattattttttaaaatacaagatatgggttgagcaggatggccttaggatctagctgagaaaatgtaatcagatgcattacactatgtgctcacgggccatgaggctctctatatatgaaacaacgagcttatgctagcaaggactgtgtccttccttacttccaatgaatttatactctaaaacaggtactaaacatattttctaaatttataatgaaagccccactcatttttagacaaagaagtgttaaaactgagggatggtgaaaattttgaatactcttctcttatttgctctctttttccaaagtaatatcaatgcagcttcttgtatgaagttagagctactctgggttttaaaaagtatagaagtttatttcatatgccttctattggcattacatttatttatattttaaatactttgggtaccactttaagtcagtttttctcctttaatctttaaatgcggacgagattatctagtgaatactttttatactcatcacacaagtaattatgtacttagtgtgtctgtcttatcagactgtatgatccagtgagggcaaagtctatgaatcttttgcccacaggtacttcctcaggacttagaacagtctttggaacatagtagatgcccagtaaataaatgaccattgacatattacctggctgattgactcaataactgttggtaggatactactactcataactgaagaaaattatccatttttctggcttacaacgtctagctttgtaatgattacacagatattttgtgatgtttgttttatttttttttattttgaaaaaattagagaaaaagtcttgctgttttgctcaggttggtcccgaactcctggcctcaagcaatcctcccaccttggcctctcaaagtgctaggattacagacatgagacaccatgcccagccttgttcaaatttgtctgtttttcagataatttgatttttatcaggaaaaaacgagatgcttatttttaaattgtttttactgaattcattcaaaatagccaaattttgaattatgaagagaatttcaaggaattttaaagtagttatctagcacatatttataaaataacttgaagtcattgtgtactttgctctttttaaaatatcttaataaaattgagtattaaattccttacaaaacaatttaatacaacgtagaggctatagatataaaaatgtatttggtttgtcatccaactatccgaagcattctattgaataaatgtttagggaaagggagattcttcatagtacataaaattggaaatgtgtttgtatattacaaactgggcacttgccattgttaaaagatacaataaagaaaagttaactgcaacttttaattacagtttttattgttatctccaacaattttctataattttcccattcttcacttaattaaattcaattttgaatatacttgatcagataatattttagtgaccagtaatgatctatgtttatcccttaaatattctatgttcagtgacattaacaggaaattcacatcatattctgggcttacttggaaggaagctgtgaaaatgaaagctttaaaacaattctgaatagcatctattgaatgtgtctgatatgttccaaatagaaagaacaacatgcataatatgacaccagaagtcatcacagaattgttctttcaacattgatggggggaagtaatcttaaaatagtcttcaaaaaatgatattctaaattgctgtaagtataaagtgagtttgtcatgctgaggctgtaggtaatgtacttgaatttgtctccaataaacttgatttctgatgtagagaactattaatgcttcagattgttgccaaacaaaatatgaagaaccacttattcagacacctgatctttagaatgcagcatcgtttgtaacaattttaacgctaactaagtacactttgatgagacagcatttaataaaatgctcattaatttcatcattagcaagggtatgctaagaagtaagccagtttcttatgtcacgcccaattagcatcccatgctagtaatcccattagtattgttgaattcactaatggaaaaactaatgggcatgctaccagggcacattaattgggcacgacaccagttctggttttaattattaaactacgataatgaaatgtgtgtttgtaaaatattaaaatgttgaaatagggttgaagaaaataaaagggtgtgtagacaaaacagatataaggaaagtcaacctacaaaaatacgaagactagaacttgccagatggtcatgtttctagctgatggagttgtctgtaaaagttgggatattgtccatgtgagagacaacccactcatactcatgggaaattaaaagctttttttttttttttttttactttggtaacatgaaattctgtatgtcatacatgttgtcgagctctttatgaggcccgacaggaaccaattaaatgtgtagagtggacatgttgtatcactgaagccatttcagagaaagataaacagaaatcatactaaagatggtatgattaacattgtatgtttttcaatatacatcttcagcaccattacatcaaacaattatctattttctctttttgaaaaaaacagcatagcaaaattattagagtttggtgaaattttctggtaattaagtgttttggtaatattttacccaatctaatttttttaatttttaaagattttattagaatgagctttattcttgttaagtaaatcaactttattaagaagaaaattcattcccatttagaagttgtaatttcttttttatttttatttaatagtagtactagtagctgttggtgacaaagttgggatatctttcacttagtcttattcacttaacacagaaaatgttactataggtaaccaaggctactataacatactggaaaattgtttacttttctcgaaagtagtgagatggcaggtgtttcttctatttctctttctcagtttttttttttattcttacctcctatttgctaaactctgttcttaatatctgccatttcctatgtcttatcacttaggaacatgtttttaactattatatgattaccttagccagaactataattattggattttaactacaaagcattgtgtactacatttaactccacccttatgtttaatgtatcacaactggctagtttttaaggtgaatgtcattcccatttgttattgataattttgtgaagataagagtgacttgtctgacatctctctatcttcagaactcattttgagtggtattttatgagttttaaatttttctcttctttttcatatttatgccatgaaacttaaagtctaaaattttagaatagaaaattctttacccttctgatgaatagctatattcatcagaaaatgcaagtgactttgtaagaaattcttactgcaaaggtgagacctttacagatctgtacactgtggtgcacagggaagtattaatacatcacaggaaagccagaatgatgctagacatcagctttaattttgagttctgtttgaaatgtatgcatgcttgtatcaggatcataatcttgaaacttgtaaattggtttataacaaatatgtgtgtgtttatttgtagatatgcatgtataaacatttatttattcattcattcccttaaggggtcaccagtggaagtaactacaactaatgatcatggcaaacaatatagtgatggaaaatggcatgaaataattgctattaggcatcaggcttttggccaaatcactctggatgggatatatacaggtaagtactttttgatatgtataaatagccctgttgatatgttggtgttgccatacttttctgttgtttatattcctacattcttatttcaccataatttctactcaattccatatatattgctgttgaatttgcctttgggatgctcctaaaaggatgaagtctggcaaccagtttttcatccatgaaggtctttggtaaagaaaaaaataacaatgaagtcacctatgtcttttacagttctttacaattcgtgtggacctttagttatgttctgtcatcttacttttgacttccaaaaaacacatacagtagaggaaagcagtttttgtctgcatttggagatgaggaaaccaaggctgagaaaaaagtaaatattttttcctaacttacacagttgagaggaagcattcttgggacacacatcctgttttttcacatttaagtttagtttttgctccagcctaccctatctgccacatttatgtaattataacatgatcactgtacctgtataatgatgcaggcttttattaaattattcaggaaatatctaattttaatcagtacctattatgttccaggtattgttctaggtgctctggatacaaggagcaaagagaatactgtaaaacttacattttatgggaggaatggggcagcaaaatacagaataaataaatttaaacaaatatcaagtggtgataaattctgagaatgaaaaagccagatgagagggaaagttgtgtgtgtatgtgcgtgtgtgtgttaagaaaggtctctctgatgaggtgacatttgagcagagacctaaagggacaaaggggaaaccatgtaaatatccaggaagaggatgctttgggttgcgaggacagcaagtatcagggccctgaagtgagagcacactacatgtggcatgtcaaggaccaacaagaaggccagtgtgggaaagagggtgtaaaagagctaatgacatgacataaggtcacagaggccattagggatcagattatatgggaccttgtgggcttttactttgaaagaaggaaactgttgaaggattttgagggaagaatgacataatatgacggctttctttaaaaggatcacactagctgctctgttgagaataaattttaaggggaatgagggtgaaggcatggagatcagttaataggcttctgcaataactctgtaataattcagacaagaaatcatggagacctgaaccagggtgataattgaagatataataagaagtattcagattctggttatactgtgaatgtcaaattaacaggatttggtgatgagattgaggcagaataggggttggtaaactatcaccatgggctaaatctagctcatgcctgtttttataaagttttattggagcacaactacacccattcatttacgtattatctatggctgcttgagtctgaatagtctacaaagacactgtctggcctttgacagagtttactggcccttaatgtcgagcaagcctgtcaggtttgggtctcaggcaactggaagaatgtagctgccaaaaccagggagtgcatgactgtgggagaagcaggtttggggagagacattcaaagttcagttgagaacatgttaaggctgagatttctaagacacccaaggggagatatcaggcaggctgctcaagaaacaagtctagttctgaagtcagaacttccagcaaaggatggtattgaaagccaagggaacagatgtaagtagggctaattggagtggattgggctctggaaaaacaaacacaaataactttgcctcttctctcaaagaaggtgggcattagaaatatgaacagggatttccattgttatgccacacagtcagagacccaggttcccctggcctttggccctggcagttcgtactggaacccagcccactattcatccctctagagtacttagggggtgcctatgggtagagaaaggaagaggcctgagaggcaggcggtctggatcattccaacatcatgatgctgggatgttgaggaagagccagtgaagaaaagtaatgaacaggcaatgaggagagaggaaaaccaagagagtggtatcccaaaggctggtgaaggattttattatttgctgagctagtaaaactagagtatcctggtgaaggtgtatttctcatctcctcttctctaggttcctctgccatcctgaatggtagtactgttattggagataacacaggagtctttctgggagggctcccgcgaagttataccatcctcaggaaggatcctggtgagtttagtaaggtatattatatgttgtcatccaaacttagaatagaacctgtttacattattttaaagtaagaataagtattatgttctacctcatgctatattttctatattaatgtgccaaaaatttcctttaggtctcttttttttaaaggaaccatgtattccatatgacttgtatttatattgttagtactcggttcttgatatataaaaggaattcattaaaacttttgctgaaatgaattataataatttcagtcaaaggtatgttattttaggacctatgcatagttttttctaagattttaaattgaatgtgaaacaacacagaaatggaaaactatgagcttgatttatactctaaatagggtgaagaacattccctgaatactatgtgataggcactaaaccaatccctagatattcatagatgaataaaatgtggtctttatcacaatagaggtcacaggcgtataaacagacaattccagcctaatgccattagtgctataattgagctatagacaaagtgattctcatatttttagaacaagagcataagaacatattctaaaatgaaactaattaaaatgaacatgaatggaattaaccttagataggaaaaaaaatcacccttcaaacgcaatgctaatattctaggattgtttcccaagtcctcattaagaatcacagggtgcctcccaagtctctcccaggaagttaaaatataactacataaatattacaaataagctagaacccagataagtataatttgttcatgggttgcagtctcagggaatcatgatgaagatcaaaaggaatagaaagtgttcatcaaatttaggagaaggatatagttgaatcctcaaggctgattatagttacctcctcagaaatgtctctagattagagagggttttcattcaactacttgagactgacagagaagtccctctaaaacacacacacacacacacacacacacacacactcacgtacacagcctttgttttttgcccttctgggaaatagtatcttcaggtactaggagagaataccctgatactaagtacccttcctgtagaggacacatctccattatgaataaccaattttactttgtctatgtaaattggccttataaaactctcataaactcaaagctgaaaactaagctttgcccccataggaaaggaggtggctgtgtgaaattcgacctcagtgcaccttctcctcctcttgatttttttttcttgctttttctctaattctctcatttgcacattttctctctcaaccttctgttatcaccctattcactgtatttataaagccacctctacctggtctggagagttccacattcaagatcaacactatatacatttcccaaaatatgaagccaaattattgatttacttcagtaacagactggttcatagatgaggaatctaaactgtaaactatatattaaatagaaacactcccttccaatctaacttttaaaattatagtactttatttttgaggctagtggcagatgaattttctgtgttagttgaaaaggcaatattcttgctactgcaaaaccaaggtttctgcataaacatctgtttctgcagatatgatgggtttgaaccagcactaaacattataattgctatcatttactatagctgatggtgtggtgtttacatgaatcattaagaggcttgcagtaaataggtagtgagagctagtgcctatttctttgactttaatggcacataaaattaattgcttgaaaataatctttcaaaatatatatttcttgatatctataaactcctgcagagataatccaaaaaggttttgtgggctgtctcaaggatgtacattttatgaagaattacaatccgtcagctatttgggaacctctggattggcagagttctgaagaacaaatcaacgtgtataacagctgggagggatgtcccgcttcattaaatgagggagctcagttcctaggagcaggtaatgctctaaaaaagacatgagtgttcacttaaaatctatgttctatcctttgtataatttaatctctcctgtttgattaacttgacctcatatgaacctagtatcacagaaatacttagttattccaatggtgcacacaaatatattcttgacatctgaatatgcaatataaattataagactcataagtatacatccatgtatgatatctctggtaactcatgcagttcttgatttacatatgttagcatcaccaatgtccatttgcaaatcagttgtttggaaactagaatgcagttagagaggtgtacttagaatgcactcagaaagatgtttcaaagagttttgtttactaggttaatccacaaatgcctatttatctcattatatagaagaacaatgttcttagttaattctcggctaggtaatgggttaagtaggccattgagagagaactggagactagaaccaccatccctgccattgctcaaaaggctacaatgaaaggggaggtgtaagtgtctgtagcttacccctgacatgcatgcacattgagtctctgcctgatcagagcagagacttccacccaggggaaggggagagggatgatggtggcttggtgcacccggcttgttcatcaaataaaagcccatcactgcctcctatatttacagctaagttggttggttattaagttgcttaaactgccttcagcacaaaaaggcatatgatattaataatataatctacacattttttattctgttttcatcaaggtcattctgagtttcttttagtcaatgcaaactacttattgttaatatttatctgaaacagtaataatcttacatgatacagacaacacatgatttagagagcaaatttcttcctgttaaaaagtataatatatatcaaagtctttcttagtatatcaaggtctttctgtcacttctgtgcaattacaaaaggaatttcttaacattgatttgcatcttcttttgtgagatttactcagtggcagactgtgtcctagagtttcttagcacccttacaatgctggcaatattgtgttacacatgctaatatgtacatatttttatctttaaagggttcctggaacttcatccatatatgtttcatggtggaatgaactttgagatttcctttaagttcagaactgaccaattaaatggattgcttcttttcgtttataacaaagatggacctgattttcttgctgtatgtgaattaatttgattaaaattactttaaaatataggacccaactttaaaataaataaaccatgtgttggcattacacttaattggggtttctttacaaattcacatttgttcattttttttcccagtcatttttagttttgaagtcctgtgaaacattttgtattttattatcctagtaattttttaagatgacaattgtaacaattataattttaagaaaacagactagatataaggaattaagaaaattcaatttagtatcttaagatatgaaaaacactatttccctcattatcttttgatatgagttttgaaagcatatatattatatatttttcatatgacatatagataatcaagtataataatatagtgaacactcctggacctaccaccacgcctgataactgaatattatcatttttggtctatctataaagtctttcctatcttgtttccatctcctttcagatgtcataggtaatcagaattttgtatttgttattcacatgcatttttatagtttgaacacctaatgaatgcctacaaattcttgcttttgaaatttataaaattggttttatactctctctttagcactcaacattgtttctgagtcatttatgtgtccacataggtatacattttcttggctgtgtagtatttctcttctcttaccaatgatgtattggttgttcccatgttttgcttcaatgaataagactgctataaacatttttatacatttctctaaatacaatgggcaactgtaactgcttttccttgtctttaatcattagtttgataccactgttaaatacgttattaaaattttaattcttaaaagttgttttaaagaactagcatagaaacaggagaaaaatatgaacatcttacccttagattcttgatttctaggcaaatagacaaatacaagtcttggcttttaagagtctaagatacgttcatctttttttttttttttttaacattcctagcatacacaatgccaatattgctaagaagggaaatggaaatttatcccttcatagtatttattaaaatttctgcttttttaaatatttgtttgtcctcttgtgtattgttggcttctttctctgaaacgtaatgtctatgaatcttctctgaaatgtaatgtctatgaatcttcgctgaaacgtaatgtctatgaatctaaggaccttggttctcttctttatagttgtatcttcagtgcctaagccttagcaattatcatgttaatcaatattgttgaatgaatgaatgagtgaacatgtgaatgagctcatgctgtggtgaccttcactgagcatcgttgagtcatctacatgtgcatacactgtggaggatacaaagatgtttaccatttggctcctcctcttgaggaccatatgcctgagctggaggtctatatgccctactatgccatgcttccaccctccaccttcctctattcattgctttgttactgtattaaataatactgttaactttaagtaactcttactaaaaaaaaaaaattaaaaaattaaggctgggtgcagtggctcacccctataattccagcacttttagaggcctgggattataggagggtagcttgaggccagtagttcgagaccagcctgggcaatatagtgagaccctttttctatgaaaataaaaataaaaataaaaagttagccagacactgtagctagttccagctactcgggaagctgaggcaagaggattgctgaagactgggagtcgaaggctgcagtgacctgtgattgcacctctgcactccagcctgggcaagagagctctgtctcaaaacaaacaaaacaaaaaaaaatcaatacacttagataaatatatacggagtgcctattatgtgcttggctttcttttaacacttcccatgcaactgaaaggaagcagtctttcataaaacttaacattacggtctgccatatctgaggactgaggctgctcccagattacccctcaacaactctttctattatactgacttatttcaatatgcatggttatcccctggaacttgataaactcagaatgtttccattgctgaaaccttgaatctcaaaatataacctcatatccctctagctctctcagtctctctcattaagttcaccaacgcattgacaccattggctattagcccactttctagttaacttacttgctccttacctgagccactataatgtatttcttcaaccatatttctaccaataccctgatcttgtgtcttgtattgggcttcacaaaccttgatccatcagtccagccacctcgcttttcagttctagtagctagattgctaaacactataggaaaactaatacgggtatgagaacttgttttgagctctccaattcttttattaaacagtatctattgtttacaggattttctaatatattttagatgtagaaagtgaaagaaaaataatcttaggatctagaaacactataacctgaatgtcttcaggtagtctcacactctcctgataaaaacaagcatgcatattcaactttcagtctctctatcaacttgaccgtatttgagccaagccagatttcactctctaccgactcaggggaacaaatgaacaattaccatgcttacaaccaaagaaaatatgtctaccgtcatcctagattctatcccttcctctgtaagaacttgttctacagtctcccctctttgtatgttcaactgttccctctcaattggctcttttccctcaatatatggaatgattgaaatttattttccttagtgttttttcttttgtctgtgaagcctcctccactgtacttttccttaccttcatggtcaagtgcattgaaagtggttacttttgttattgccactttttcatctcacttcagtccctaaaatgactgtacattaggttcctgcccctaccacacctttctacaaaatcacttttctaaagtggtcaatgacccccacatttcctagcccaatgatttttatttcttatattttttgtcctttttctgtcattctgtttttttcttattcttccctactgattttccaaaatactagtttctcctgatttcattaagttctcttagcttctttaaggagatcattgtcacttaaaagaactattttctactacaagacccttaaaacattggtcttgctgaggacactaatcttttcccttttctctcagtctttttacactcactgaataatcttatttattttgtcatgtattttctcctttttgctgggccatccccaaactgtgtatctttatgtttgacttcctcaaaaagagtttcatctggatgttttataggcatttcaaactcaatatatttaaaatgaactcacccctcctccttgtcaacaacaacagtcagcatttctttcaaatgcttttcataacgtgatgatggcagaacaccctcctagttacccaaaaaagatgagatgtgttcttaatttctttttaattcatctaactcatttaccttttttaccaggtcctaatgagttgcttttacaaatacttctaagattgagtcttctctttcatcagcatcatcattatccttattttaatgactctcaatatgttttcacaattaaatggatttcctaatgcatttcctgaattctagtcgagattttgttttcaatgtgtacttcttatgtctggtaggctaagcttttagtgcaaggtaatactgggaagaatatgagttttggtttcagacagacaccaaacattctttccataccagaccctcctatcactgaaagtcctttaaaatctggcttctacatagctggcaagacactacctcacctcccacctccatatgtaccctttgtcttagctaagttggtgcctttctctgaacctgatgtcctcatgtcatgcatattagtccccctccttgggggaccctccatgaatcttatatagtttctaaaaccttgctttaaacctttcccaatttccagggagcaaaaagccttctctgttctctgctttcactttactcctttcttgtcttgattgttgtattgctcccacatgtttgcctctgctactagacagtatgactcttaggagcagtgtttaccttagagcagcaggtatatggcacattgtaagagactcgatatttattgaataagtggttagacaaatgaaaaattgcttacctgaggtccttcctgaagatgatgcttttatggaaaaattcataatttttatctggcatgatttaatttgttttactcgacacaattgatctcaagattttaaatatcatatggttactgatatggtttctaacaaagtaaaaatatattaggtaaaataattatcatgagacattttgaaggaaaacctatgaacttattttttactatgaaaatttgggtgaaatatgttcacattagaaaatggtacagtcatctaatagaatacacatagaagcaattatgttagttaaagatttagaataaaaccgaaatattgaatcaaaatatgtcttacatatttgaaattgagttcactagccagttaaaataagcttaatcaagcttgacatttcattttcttattgtcttgccatattttcccccaaattaaattgatatatgaagtagtattttctcattttctaaaaattcaaagagtcatagttcaaagtgttctgttctcttcagtcattcagtcacttatgcaggggtttaatcttctaactatgttgcagcaaaagtaaaccttaggtctacataacatcgcatcacatcctataatcattagtaggtatgaatttgtttgcatcaatacaacattcttcatgtcaactataagctagaaaagtgtttcctatgttcctaagcagaaacttagggtagagtgacacatttctatagagtgctttcagggaactgttttgcttttcttcaagaaattgactttctgctctctcccaaactgcccttctgcagcctttttatatacctactttcttttttaatataaaatacagatggagctgaaaagtggaatattgaccttccggttaaataccagtcttgcctttacacaagtggatctattgctggggctatcctattgtaatggaaagtggaataaagtcattattaaaaaggaaggctctttcatatcagcaagtgtgaatggactgatgaagcatgcatcggagtccggagaccagccactggtggtgaattcaccagtttatgtgggaggaatcccacaggaactgctgaactcttatcaacatttgtgtttggaacaaggtaagttccatctggaggaattcacaaatccatacagccctggtgctaacagtttttggtggttctgtgtttcaagagatagcaatagactcaggctaaaagcagcacccaacagcatctctttttctggagaaatttaaaccttaaaaactaatgaaaacactttttcaaagagttttgtgtgttacccttaacaatgtgccatcatttataatcagcatatttatttcaatatgtcctcagtaaatagtaattaatatacatattattattaatgtgacatataattatatatgtggtacataattatatatataaattactatttactgaataaatatcaaaataaatatgttgattataaataaggtaactgaggtgcttcccaaagatgatatttatatggaaaaattagtaatttatatatttatttaaatatgtaatgcaattatatgtgagatacataattatataagaaatatatgtgtgtacatacataattatatatataattatatatataatgcatataaatgtatttcctcatatgttggataatgatcattatctgtatttacagatgaaaaaataaattaagttggtatgcataactagtaaaaaatatcaatgcaattcattgccttttctttctttgacataaatgctaattgtctccatagtttttcagtagagctttcatgtggaaaaaaaatgtggggtgtatgtggttgacttccaaacatacttgtgaaaatctatatattgtagattattaataactataagagaaaggaaaagtgcattatttacaatttaggtgagaagttaactcatagacgtttgaatgtaatcagagaaataattaatttgaaaaggctaacaatatctgtgtatcatttcttgtggcagtcatggttctgagagcttacatgagaataggtgagtcaattattcataacaagtgtgttaggcattattatttatatcctcattacagatgaggaaactgaagagcagagaggaaggtaactttcccaaggtcacatggctagtaagcagatagcaagacactaagtctctcaggcagcctgttataaagtcaactctcctttttacagtcaatgctctcttttatgggcattggtcaatgctcctttgtaaagtggggaaagcatagtaacttccagcataggaccaagcaccctcccacgtgtgaaaaaggtcctttacgtatttcaaaatctacataccctgaatggttaaaattttcatgaggcaatctttgcctatttggtaagtacataaagatttaaatgcctttgaatagaaaatatatggcaagctcttaggagacttttagaagggtagtagtaaggagttaatgaataactggggtgtaagacagtaatgacattttcaaggcacttaagatgtaacagcagctaaaaatattacattcatataagagcttctccaggttttcaggtttctgaggttagaaagaacttgaaaacccttcgtatgagtgagattacttaatcctgtttgcttctgggaaaaaaaaaataaaaacaagaaacaaaaaccctgcatgtacagccttgttctttgaattacccctaaacccattactattgatggtcctaaagacgtggctaaaaccaaaattgtaagataataacagaagtttaaaacatcaccatagacccaaagggaataattttacctacacactatgactaagtctgtgatactggaagatattttattagtgagtaatattaaatttttattactgtagtatcatccatatcagtggtctcaaaacactgaaaaaatattgacgtatggtagctggaacgtagaagtcaaaattagccattatttttactattcaagatacattgacatcacctggaatggttattaaaaatacagatgttagggacccctgtcccctaagattctgactcagatgccttgagagacactgatctatataaatagctgcatgttttatacggtgatcagggagactagtcacaatacagaggtgcagcatgtatgtagtcaattgcaattaaaacaaatcatgttcatttaatgtatttctttcaacccactatcaattgtcttaaaaacgtttttccttttctctgcttcttaattagcaccttttttttttcatcagaagctctattttgtggtcatattagtgctattttttttttaatctactaacgttgcaatcttcctccgaaccagatacaagactaattttctttcttgttttgaaaatgctgggcaacataatttgctgaagatgtgccagctcagatgatgagagtttatcttcttagaatgatcaatgaggataatcacttacatctaggttgggcatgactgggtctggcatgtggtctcacaggcaatgctctgcccaaacccctccatggagagggagagagtgggggctcaaatttagcaggcctgccaagccaagcactctgcagcagtactgccttccctagaggaagggctaatgtttttctgattagtcatcttagagctctgggccgccttttaggcatttagaggcccaggggtggtggtgtggatggggatttttttggattctcacaagggtagtggagtaagaaaagaaagcatttccactcctctcgcaaacatcccctttctccttttgttgtcctcgcatctcattcaaatgttttaggtctggggagcatttctggtggtacagagttgaaagcacgggacaaccttaactgaactctttggttgccactggaaggaccctgcactagagctcagcagcttcaagagctcagcagtctccaaggccagaggccagaggaccatttccttaggaggattagtgcttacaaacttcattttataactaactctctaggcctttttcttcatctccaaaatgaagaaagatgtatctccctgggctttcccaaattgaaaatttcatcttgtgaattaatttttatgatgttttttgctaaatttttaattttttaaacattatggtaaaatatatgtaacatgaaatttaccattgtaaccatttttaaatgtacagtttagtggcattaggtacattcacattgttttgcagatatcaccaccatccctctgaagaactcttttcatcctgcaaagctaaaactatgtacccctcaaaaaataatgtagcatttcttataacagcacttgtttgccaagctgccctttcactgttctgattttgttggtagggaagttagggtacagagaattttgataatacagttatgtgccatcagaaaattactactgataaatacattaaaattcttagcttctgaattttccagccaatgatttcatattgagcttcattgctttcaattcaattcacccaacttattgagtgtctactgtgtgtttaagatagactagcagtattgatcagtcaggactaaaaaaatgtggataatagtaaaagacatttaaaaggaaataggctgcaacttaatgtgttagaaggcataataagacatcatatgaatgctgaggagaacaatatggtcattgttactattaacttattttactgttatgcatttcattatattttatttccatttcctgctgctgtgctttaatcttgaaaagagctgatcatgtgtttgaggcctttcaaactttacagtgttttgttcggagagagagagagagagagagagagaacatgcacgctacagcaatctcaaactcggtcctgtttgtcccaatttcgtgcagttttctgcgcagagtactgccagacttcactgagctgatctctgttttcacaaaatagcatgtaattcaaagccactgctattccctggctaactggatgccttttttgtttgctgtctaacaaaaaagtggtgaatactctaaattcatttcatccgcattctctgttaaacttcacagaatggtactgcgcagtgggtgttctaaggtcacctgtgcagaatgcacattccatgaaatctcatggtgttgctattgccaacagtgaaggctggcccctgtcatgctaatggggatgtaaaactggtgaccattttgtatgttcaagattatggaactctgtgaaaaatgatagagcatagtgacagctcttctgtaggctgatgtaactcgggctaaattctatacctctgaagtgatcattatgccattcatggcaatatttcaggactaatatattttgaaattatgttctctctcctggtattctacataaaatgctcagagtgtatttttccccaatgagcttactgaataatcatgctaattcaaatattattttttggcacttaaaactgacttatatagtaacttaatctttcagaattaagagacatggggctatccccctaccataatatgaagttgcctaaattttattttatgggaagaagcggaatttagaaaatgtgggcctaaggaggtaaaataaatgctttttcagtaccaaaagttaaattagaattatccattaatgtgttttccaaataacagaactatatttctttgcaacaaattagcttgttaaaaagtaggaggcataaaaggttttccaaggaagactcgaaagtctagcaattgtatctaaccaccccccttcctcaaaatgtagtgctgcagaggacaaaaatgattggtaattaatgactcaagccctttatgcgatactaatcccttactatttgctaggtttcggtggttgcatgaaggatgttaaatttacacggggtgctgtcgttaacttggcatctgtgtccagcggtgctgtcagagtcaatctggatggatgcctatcaactgacagtgctgttaactgcaggggaaatgactccatcctggtttaccagggaaaagagcagagtgtttacgagggtggtctccagccttttacaggtaatgtggaggtcctctaaattaaatgttacatgtctcttattcatccccctttccctccctgccagcccctcattaatctatatgagtattattttaatcttgctgcatcttatttccatttaagaatacctgtatcgagtgatagcctcgcatgaaggaggttcagtatatagtgattggagtcgaggacgtacaacaggagcaggtaaatacttatcttcaaatgcatatgtgcacacacacacatgcatgtatttgtgcatttatataaaaggaaggactattaccctgaagcagtaatatttttgtagtcttctgacagagcatgccttggtttgaaaatacatctgtcaatggctaaaatgcttagtagatcagtgcttttcatttaccaagaattcactaaatacttgctcagacttgatcctttcctcttaggatgcagaagtaaggaaagttcaggttgtcttaaggatgtaatagtcccacctacctaacatgtctaaggataggtaacctttacagatggtgtagatagcaagaagctgaagtcagggattaggattatccttggctgggagtggcaccttcttgactttctcacagaaagcacatttgaaacctgcaactggttggaatcaggggtgtctatgacatcattgcagatgtttgccccgttgttgactattagaatcttagaatgactctcccaagagagaaattgctgattggtttaatatattttgaattggaaaagaaccaactaggagacagtatacattagacctaatctcagacaactgacttgttttgtacttctgactggccacaaaatcttttcccaaaataccaccacaggaaggcattcagcacaaagagttttgtgaatcagtgacattctactattttgggtcaaatatttgtcaggaaactgaacacatctccagatgattgccacttatgtctcagcaaggaagtttattcagcgagtatcaatttgtctaaagacgtgtttccatcaaggtattctcttatacttaatcaacagtaggttactatcccaggcatcctttgaggaatcttcttaatctaaaatataattaaatactgagatgagcaactaagaataattttcaagactctctacctacatattttccagaagaggacaacttgacacttttccaggatgatttaaattatcacctatttataggcaagacaatgagctgaacgatctcttaaaattcttttcaacttcagagctaagagaaagctccaatataaaatactcacttgttactgacatgttctctgctcctatttcacactcttctactttattaacaaatataaagcccgctttgagtataattcagcaacattaataggcgtctggaaagcacattgcttacttagcttaatagtccccattttgagtactactgagaaagtacacaaatagagctctgaatttatagcaatgatctgaccacagccctatgccataaattcatatttacaatctgaccacaacactgagcagctacatgctcccaagggttggagaataattgcactatttaattatttttgagtcagttttgctctgtcccttatgagaagaccatctgttagactgtactgtactttgccctgtaccacatttccgaactaataaaatcagcgtcactcccattgtccctttccttgcaactcgatcttgtggcctgtgtgttttctataggtgtctgtagtgttttaactgctcagagagtggttctcccctttggtgtttcctcttatcttttatgttcactttgtttcccttaaagctgtcctactttattggtctggacagtaaagtcggagaggaggagatttgatgtggaaaaaccagagtgatcctccatcgacagggctcaggagtccatgagcagctagagcaggtctctcatccatcatcctgccacggagttccttgggctctttctttgtgtccccagtgcactcagctgtgatgaagtttttactgatcagaactgtagaaatgtctaataaatagttaaaggtaatagattttttaaattagggggctcagcttgtaagtaaggttttgcagttcttttaaacttcctcattttgtgatattattttgaaatattctgcagaacaagactttgaaaatgactttgtagaatctcaaaggcaccagctcctttaccccacccccacccccaaaaactgcaactaagaatatattccatatatcatatctggtagaactttgctttttaaaaattaattagaaaaacaattgcatttggaaaatgggtctaggcattcaagtacaacacaatcacatttgtgattttttttttggctaatacatcgaagatataaaagtgtcaaactactatgtataataacagtctaattatcttgcttcaaagggggtacatcattatattgcttgaacttgttatctgcctaccatccacctccttctttatgagtgatgtttaaacatgtctgatacattaaatgtttttggaaaacctggactagacttgaaagaatgttatgtcgatggagttttgatggttttgaaatatcgcttaaactgaatggctcaagatgtgcagtcatattaaatcaatgctgaaaagttacaactctaataaattgtatttatgctaatggttgagtctgatttactgcggccattaaaagtgaagaataggagcaatagtcttctcagaactgccattttccctattttctcttttattccttcacagctccacaaagtgtgccaactccctcaagagtccgcagcttaaatggatacagcattgaggtgacctgggatgaacctgttgtcagaggtgtaattgagaagtacattctgaaagcctatagtgaggacagcacccgtccaccccgcatgccctctgccagtgctgaatttgtcaatacaagcaacctcacaggtaaatgcaatcctttaacagagtagaccctattaacttcctttttgtttgcattttaaataaaaatcttctgcaaatgttttttagaaaaatgtattaaatatacatgtattttacctgattaaaaacaacacccatctaaagtagtggaagcctgcatctacctaggataaaaaggataattctacaatgcgcatgggctctcatggataattttattctaaggtagatattctctccatcccccaaagattacatcataggtggctatagccctttaacaccttatagacatcttttggaaatcctatgtataaatacttatttcacaaagcaaaaatttactctttgggactagccccagttcataccactattatttattgtaaaattgctgattaaacctaattatctcaaggtggaggagtcttagagccccagttagttggactggcaaatcagtgaatcgatttctcacagtgtggtgtgccatgaagaatgattataatgaaatatactcatacacaccactaacacatctcacactcaaattcatgcgtgtgtattaagagcatttttcagcttcatgaaatattaaagcacatttaaagggagagtttaatttaagcctttgataaaagggaagtaaatgtgtcaaatttgacagaaaaaaaacattttcctctatcaaaaaatcctataacgtgaaccatcagaatggacgttagaaaagccttaaatattttcccaacaaacctgttggtcaattccctcaagactttacttccttctttagacactttggaatgcacagcccaaatatactaccaacttttagcaaaagaaaaacaaattcacacccttcacttctttcctattttaccctccttatcaaagcccagcctgagtaagcccacagcttgccttttcacaggttgcatatggcagctacatgggctggaaaataccaagtagtttattgctaaaaatgctcaaccccactttcagatgagcactcagtaatgacaccaaccctactgtatttccagaatagctccttcccccattctcctcattaaatattttatatttttccaaactatacacgttacctccctttctcatcccactcagctgacagcgttctattttagattatattagacaccatagaaaaaacaatttattttataggatttctattactttcttactaccaaatgtacatattaattgcatttttctgcctgatggagttgttattaggggttggatgaatgaatgcatgctaaaacacataaaaccattttgatatacaggaggtgtgtgctatgctataattttattttcattattatttttaattttcacgctttttttcctttctgttttacaaagcttctcttatcctatcaaaaatagaaatcttcacaagtcctctggaccctgactctttctgtttcttcagagatattactgatagcttatcgtcctctcacttatatttttaacgcctctgtctgctgcagtagagtatggcccaaggaccagcattactagcttcacttgggaacttattactaatgcacattctcctgccctgcccaccccacacccgccaaatcagacactctgcagtgtggctcagcagtccttgttttaacaagcccccagatacatctgatgtatgccagcatttgagaaccactgactgggtggattcttcccagggtcattcaaactcttttatctcccattgttaaaaaccaacacactaacccaaaccaatcacaaaaatcttaattctgtccaaactcccagctattgctccctctctcctcctctcggccttcgtctagcatgaagtatctaagctcattttgtcctcacttaactggcttctgctcattactttcgtgacgagcaccaaaaactgccatgtttacataggcaaaaaacacttgacactctatgtcttcaccactcttcagcattctccacagtaactctttcatcatttctagaaatatttcttcacttctgtgacttttctgcttacctcctggttctccaggggccctgttctcagtgtcctttgctcacttcttctaaagtgtgacaaaatattgaagagtctcaggatttagaactgggccgtcttctctttctctttcatttttttctggcttgctccagaagccttattgactctcataacatcaaataccagatagatgctgctattgactcctaattgtacatcccacctagacatccaaatgcctgcatccaataggcgtttggacacaatgacatttccaactggatgtctctcaccttctacccataccaaacctcaactcttgcttctcctgcattctcatagatacctccagccacccagtcaatacaatttgagagttactctggacttttcacctccttcacacctcatatccacagttgtcattctatttttcaaaatatgtgttaaggtcatccatttctcctctaatctactggccagcccaaactactaccatctttttcctggacaactgcaatacttaccttcatctttttcatagccttttttttttttttctctccctggccgtgagtgtattctacagagcatccaacatcatgtccctctcctcaaaaactttctttcttttttttttaattatactttaagttctgggatacatgtgcagaatgtgcaggcttgttacataggtatacatgtgccagggtggcttgctgcccccatcaacccggcatctacattaggtatttctcctaatgctatctctcccctacacacaccctccaccgctcgacaggccccgatatgtgatgttcccctccctatgtccatgtgttctcattgttcaattcccacttatgagtgagaactcgcagtgtttggttttctgttcctgtgttagtttgctgagaatgatggcttctagcttcatccatgttcctgcacttcctctctcacaatcacactttgtctgggtctccccctacttccagggtttccaacaattaccgttgtaattaatataatttaaagaaatttgtatgtaaatccttaggagaattcctgacaatgatgatataataaatccctagcagtggaataactgcatcgaaggcttttaagacattgtatagtcttgaactttgaagtcagacattgatataaatctctgctatataccttccctgtggataagttccacatccttctggatcctaaagtcctaacctatgaaatgggagagtgatatttacctcagaagaatattgaaaatattaagtgatatgatattctagctctaaccctttttagctgtgtagcttggacaaatcaataaacctctgtttgctttaaaatccttctaggtaaataagaatgagatacaactacatgcctcccagggcagctgtggggattaaacgaattcatatgtatgtaaagcacatagcacagtgcttgacatgtggcatgcactgtatcaaagttacctacaggatatctgtaaagtgtgtaacattatgcttaatgcttggtaatttctcaagaaatggatagcaattattattattattattactattattatttaatgaagtctcactctgtcgcccaggctgtagtgcagtggcgcaatctctgctcactgcaagctccgcctcccaggtttacgccattctcttgcctcagcctccccagtagctgggactacagacctccacgcccgggtaattttttttgtatttttagtggagacagggtttcaccatgttagccaggatggtctcgatttcctgacctcgtgattcacccaccttggcctcccaaagtgctgggattacaggcgtgagccacagtgcccggccaggatagcaatttttacactgcccaaaaagctgtacaaattatgcttccaccagcaagcagaatgcaagattgtgcatttcattttatctagccaacaccaaggtttacacttgaaaaaaattgcaaatttaaaaggcaaaatatatcagaatattgttttagtttgtatttatgtgattactagagagattagttttttaatatttattgaccatttctacttcttttatgatgtgcctaggtaggtccattgttttttattttttattttattttatttttttattttttgagacagggtctcactctgtcacccaggttggagtgcagtggtgcaatctcagctcactgcaaactctgcctcctgagttcaagagattttcctgccttggcctcccaagtagctgggatttcaggtgtgcatcaccacgccagggtaacttttgtatttttagtagagatggagtttcaccatgttggccaggctggtctcgaactcctgacctcaggtgatccaccagccttggcctcccaaagttctgggattacaggcatgagccactgcacccagctgcattgctaatttttctattgaatgattcacattttctcattaaagtttttctctgcatatgaagaataatatacatgtttatctcatctaatgcaactcccccagttttgtcattttttaaaaaattttgatttgcatttttgtgtagagatttaaaaaatattttatgtagttaatataacacccttaaaatgttcaatattctatgtgtgattttttaaaaatatatattccccatttagggttgattattgtttatgttagatataccatattgataacatataatgcatattcctcaaaatagtaattctaaggttaggataagaacaaatcagaaactggatgcagggaggcttttcaaattaaatcagcctctcccaagattctgaaggataccttcttgaaggcgagatcccacagattgtaaaccaatgtagggcagtactggatgttactcaaaaggcatgtcatacatggtagtgatgtatagggagaagaaaatcagaaaactgttgagcaattgttatttatttttatatatcaaatttgtcacaaactaagggaagagttaactatgttaactatgcatgcagttttgtcaatttctctgagatttttttgtttgaattttttgagtttttattacttttacacttattatttatgttttaaccttcaaagtctcattgctttaggtacagtcatgcattgctaaaggatggatatgttctgagaaatgtgtcattaggagatttcatcaccttgcaatgtgcttacataaacctagatgacatagcctactccacacctaggctagatggtgtagcctattgttcctgggctgcaaacctgcacagcatgttactctattgaatagtgtagggaactataactcaatggtaagtatttgtgtatctaaacagatcaaaacacagaaaaggtatagtaaaaacactgcatggtaatcttatgggaccaccatcctatatgttgtctgttgttgaccaaaacattatgtagcacatgaccacatggcagcaacttggctaacatcctttaattcaacattgttttcttataagtttgatgagaaaattaaaaaaaaaaaaacaatccctagcaagggccactctctgcatggaattttcacattttccccatgtttttgtgggttttctctgggtactccagtttcctctcacatcccaaaggttttccccttacatgaattgagttgtctacgtgaccccagagtgagtgagtgcaggtgtgtatgagtatgccctgtgatggtatggtggcctgtccagggctgattcctaccttgagccctgagctgccaggatgggctccagccacccacaaccctaaagtggaataagcagattggaaaataaatgaatgagtaaatagaaatcattataaaataaaaattcataaagtctatgataatcatacagatgcacagcaataaacaattcagtatgacagggctcagcaagctgcccagtctgtgattgctggggtttgaacttcatgctggtaggcggtgctccttacaatgttcacttggaaagcatttattccttgatttatataccacaccactgtcactcactgattcaccaaaacttgagtaaatcattatttcgttttgattaatcttttgtaaatgcatgtatagcacacattcatttcaatgtttaatattagtagtctatagaaatttggtgatgttttgtgaccagaaatatgccataggatcttaattcttttttacatcaattagcctgtgggaaaattgggtttgttgtatatcatttcacttaaaagtgatagtttacaaaaaattccaatgacattaagtgaagacttctatatatctctgcagttttagttttatctttcacttgagattctctgtatttaagtacgggagtcactcattcatacttgtttttataattgatataattggtcttctctctgccatcatgttttatgctttccagttttattatttcttgttttttagtgattttttcactacatttcttgccaatgtgtactatgaattctttgattttttttctttcaaggagtttgcttctctcaatgctaaattgagtcatcaaggacataggtagaaggtaatcttaaagactaagaagaactccagtattgccaggtggacttttcattgtgaagactcaggataatgaggagggaatgtgaattgagagtcaccaaagccagcttggataattatcaaagtcagagaatttcccagtaaacaaaaggaatactaggaagtgagatggaaggagctgataaagcagagagccagaaagctggatttggtggagacgttaggggtgcagagattgttttgaggcagctgttttgccagttggttgagaaaccaaggtaccaaaagagagaaaaatcggtgaagcctatataaacagttttgctattgagcagttttgctactgatcttgaaaataacccttatttagcatttctgaggtgacttttgttgagattttaatatttaagttaattttggttgttagagtcatatttaaataaaataattctgacactgaatgtacaaggcaatttcgctttattagttagcgtagggttctttaccaattaagtttaaaaaatgctaatcagaaaatgtgctgttttatttcattaattttttgttgtataataagctcttttattcttcagatttgggtctttcttcagcttggaaaatttgccattgtgtttatgatcattacttctggtgagaaatagcaattttcaatattgtatatttcttcctaggttgtcttcctcattttagtagttcagaacacggcttgtagagtcaaatcaatctaaggtcaaattccgcctatgccactttttagctgtgtgatctcagacaaatttaaaaacatatccttacattggagtttcctcattcataaattggggatgaaaaccttatttatattatggaactgctataaagattaaaatgagttatgtaaaatattttgctcagaaacaggcacatagtgagtgttcaatgaattcatagttacctttataatctctgaattacagtttctgatttctgggttattgtcccataattgtttttatttccattttctgatttttgcactgttgattctgctctttgaaacttctaagatgatttttaattcttctagttcagtctttgatatgatctgcctttttcctcatctagcttgctttgatttctgcctgcctcttgaaattctcaatttttgtcttcatctcttgtttactgcttaccttctgtctcttacttagtggattccaagttattttagatctaattaatggcatgcaactcgtgatttttaaattttacaagtttcttgaattaaatcctccccagaatatgacaatcttccataatttgagggctatatccttatccttctttcaagttacaatttttccatcagctaaatgtcctcccccaaactcaactccatagtttagttggctcatctctaatataaccttctgactgggtgtttgcatgggaaaattaaactgttttcaaatcatcttactgggcatccagttgctgttaataaaagcctttgctaagatgatgacagggttagtggggtaagtttgcattagccgcgcagccaccctacagtttcagcttctttcttcccagtgtttggtagagtaggagtgctgagagcttgctggcattttgcttccagtttaagtttgggtttgcctaggactttccttctaacagtccattgtctctgcctggtctcgttttaggtatttataaaactttggtcgtttcactgggattcttacaaggtggtagttcaaaactatagctgtatactgagtcaactggggagctttaaaaaatatactgatggctgtgtgccccacatgcaaaatgtctgattaaattggcctggaatgtggcctggacatttgtacttttaaattatctcaggtaattctgctgtacagccagcacagggaaactctatttaaaggaggagtttgtcaccagtgatcacatttaaattttatccagatattcttataactttcatttccccactgaaactcaaaaatgttaggaaataaaaaactaaatgtatataaaaaataataagctattaaaagtaaatagaaaatactagcaaaggaatatcataagatgacaaaaattaagtgtaatagttattgggaagtgggattttatgttcagacttacaaaaagcagaaggtaaaagcaaagaaaattattaaaaatgaatatcaactaagataactgaagaaaacagaatagtgaagcagaatatttaccattcatgaatttgtctatcagaggattaaatgagataaatcccagttgcaatggagagtccaagggttaacaggcccgctcaggagcaaatgggcccctttgggccacagggtctagattctgtgccctcccaaggccaaggttcagagcaaggagttctttaaggttcattccctcagccagagcctcagggtagaaaacccttcagttatcactcctgtgtatctttagatttgttgaaagggctccaattaactctgggtagcttttgctgatttttcctgcagccctgttaacatgcaaagctgcagcccagagagacaggactggcgtttcccctcaaactgaggactgctcagaaactgacttcataatttgatttgaaattatttcaagaatgaatggattcaagacttcgcacatatacgaattattttttccgtaaggtgtttaaacatgtaaacttaattatcagcataattactacagcacctggcatcaagtgttacagatataattggtgtatacaaaatattttctcaattttattgttgcattacattgagctaaagtctaggggttatattgcttcttcaggtaaaatgataaataatagtaatatttcttactatttgctatagtttggcaaatgaatcaataatgataagaataatcttccagatgactcacatatatctacatttatgtaaagaaaaagacattttaatttataacacaaataataatatagcttttgccactaaaattgtttcagtctttacatacaatggacttaatttttttacctgaatgaagtgggtttcatactgaaaatctgcctctaatttttgcctcttttacatggctactgtaataattagtgactctcaattctactggtcataaggtgattctcagattacttataaaatgcagatttgggggtcactcacacatgattctgtacatctgggctagtatttagcaatttgcattttacctaatgctccaattgtatttttggaaggtttatgaaccacatattgaaagacactagtgtagaggagtggtcagcttagactggaatactttcacctgctaggcttgcaactatccctgctttattcctgcttctggttctgactgtgttagctttgctgccagaaaaatgccaaggcaagtgaagaaagagaggcagtgtcagtaggacccctgaaccccagtaggactcctgaacttctgaaaattcccagaagaaagaaagtaagaattggggatcttgataacatggattctgattcactaggtctgggaatatggtgttagattctgcatttccaaccagccccctcccactctgtcatgccccatatagaaaggcaaggagctcactatttatatgggaaatggaaaacaacaacaacaacaacaaagaaaaaacagtaaaataaaacaaaacccaattctcaattacaagatgccccttaggttcatataaaagtgagagcagtataattcaatgtaggaattatcattgcaatgtcttggtagagccttgcctgcatgcatttaagttacaaacattcaactacatattttggaaatgggtaagggatggaggaaaaagtaaaaaagcaaaaattaaacaaaacaaaaacctataaaaatagtgtcataggcaaaggatgctatccagtatggaaaatgtcaacatctgttagctggaaagaatgtttgaataattttagggtttcccagtcattgacaaagaagtgatactcattgtttgggtgtctacaaaaagaatgaagacttcagagccctgaagaatcattgatttctgaagagttagaggcatacacaaaaccaaatgtactatactttatgggccatataaagagttgtcaagggaactttaaatcacgttatttttgccttatgcctgattttggaacttaaactcagctatgcagagtatcatcagtaagattaaattaaattaaaatgctactctatatatgtatgtatatgtgtatgttatgtacgttcatatattatataaatatgctctctctctatatatgtattctctctatatatatgtaaccatacttacctgagaagtctgcagagaaatgactgtaattcaacgccgtgaaatttttttttctattcaactgaaagttcttactccatagttgctaaaactgcctatggtactctctgtgcacccatgctatttcttcaatagacaataagctcctggaggacaagtttcatgtttcatatttattttaagcctcgttcactaccttgctcaaggtaagtgattaatatacttatcttaaaagaatgaatgaaggaatctttcaattagcaaatgtagctttctgctactaaccccatagttaacctaatgttaatatttttttgtgctgagttggactgagtattgaactactagtccttactaaagtctcctcagtcttttatcaacagttctttaattttatagaagaatgcacagagctatcacaacttaaatgtatatttggaacttaatacacatttcccaatagaaaaaaaatatgttggtagggtaagactaataaataactaataaagactaattccaaaacttagacctcagaatagaacccaaccactacatatttgaaatgaaaaataatggaagccaatactgctgcaatgctgataattataaagaacagaaaatattcatttatttaaaaaagtgatctaccacgttccatgctagtgctaggccctatcattgtaacatgatttttataacactaaaatatagcccaagcactctctctgaagtataagattatgtagacaatgaaagttttatagggaaaacctaacagagatgggtttatcatttttaattcattatttcacttgagatactgagaacctaaaataatagcgatgaagtttttctctcactggtaataggtgtccacagtaagtcaatgcagaggcgggatgttcataggcgagacccacacacttcatctttttgctgtgtcatccttatggacaaggcttctacctcatagttcaagatgactgcttgagctcctgccatccagtctgattttcacccaacaggaagaaataatggttaaagaatactcacattcactttaaagacatattttagaagttgttcctccacctctggttatcttgcgtggccagaacttagtcacatggctgtacctagcttcagggaatgttgaaaaatgctgtctttattccaagtagccacttgcccaggtaaaaagtgtttttattttactgaggaaaaggagtataatacataataaggagcaattagtaatctttgccacaataggaaatcgtcagaagtaaataaaaagtaattctttttgttggtgttattaaagataaaagccagtttttatagtagaccataaattaatattccaatatttgtagtttattacgaacttttttttttaatttgagatggaatcttgctctgttgccgaggctggagtgcattggcaccatctcagctcactgcaacctgcgccgcccgggttcaagcaattctcctgtctcagcttcccaagtagctgggactacaggtgcatgccaacacatctgttttttgttttttgttttttttgtttttgtttttgttgttggtatttttagtagagatgggatttcactatattggtcaggctgatctcaaactcctgacctcaggtgatccacctgcttcagcctcccaaagtgctggcattacaggctacaaaatatttctttaaatgtaaatcttgaaagaaactggtctgaaaaaattcacaggacgaaaatatggcctatgacataaatagtaaaaatagaaatgatgtaatgttcctgcttagctaatgtagaaagatttcattaggtaatgcagtgttgatgagttaatagctttgtctaactctcctgaatacataatgtgcctgaactactggtacattgtgaaatcttcagagagagttgttttttaaaaaaaaaagtttttcattttattttatgcaataagaattgacaccaaaggatttgcatttctttttggtaacatgttgagccgtagttaaaaatgatgaaaatatataacttttgttctacagtgataatcaactaggcatgtccacaatgcttataaacattcaatacaaatacttcaaggttatcaatcatagttgataaagaagaagaatgcacagccagacttttctgttttctaccttttatgatcattttatatttgtgttatatttggaacaaattaaaagggttatatgtataataaacaaaggtccaatattgaacccaatctctctctctcacacacacacacacacacacaaatgcacacatagaatttcttataaatcagtcatttttgtaaaggaatattacaggcatacaaacttgctcattttggaggacaagacttctaatttctgtttgtaagcaataggtgtcagtaataaatttgaacctcttaacacattttaaggtgcattttaaataagatattttatagtaaaaagtgtgctattattgtttttaattaccatttttcaacacttttttcttgtttgtggaactggagcttaggtcaaatgggaggagtaatgatcttggggtcagaatacaggttctaatattggctctactgctttttagctgtctggacttgagcaccatacagtacactcactccaaaagcagcctcctctgtacaatggaataacaatatcagaggcttgtagcaggggaccttggacactgatcataagggatgactttcatttctctttcttttcttttcctcttgtctccttgcctgtctctctgcttagtcaggtccagtgttttcttgaagagtttcagtaatttcagtgtgagacctttatgtaaggtaaagagttaacacaagcacgtggcttcaaacttattggcaaattagaataaaaatggcaaagactctgtagttcttaccacaaaggcattgattaaaaatttgaggttagaggtaaacctgctgagagaatcttaactggataatactttgaggtcaattaaaatcactgtttaaaccgtcctctaagactgggattagaccacatattttataaagaaataaagaataatgtttttcctgtttgtaagaatcaacatctgcatagtctttgataggtatatgatattctatgctctctaccaaaagttttaaacaaggtcaaaaaacccatttgaaggaaattaaatgtaagaaaaattagttttgaagtttccaagggattaccttaggtttgggttaagtgtatttattgttccaccttttgggtaaaatgcaaattgactttccctttgtaaatattagaagtccttatttttattgaaaatattatccaaaaacaacaataacaaatcccaccctcctgggctaagaaccagaggagaagcatcctggatatgtttccagatctctattagatagttaagttttcatccatatttaacaaatgtcattattcagtttcatgggatcactgtgtcaaaatgtctgtgttagaactttattttcagaggttcctttaagtggtcaggaagcatggcatattggattgattactctctttaatccatccactgggttggtttgggatgtatacttaaaaattagattttatcagcactgcagcgggatcctcagccagaagtctcttcttctgccctccttcccctagccagttttcttttaaaaagtgggctcttccattatgtctccaggtagcagtagcagctctgcctgtgtggcatcccttaccagatggccctcttaataaatgtcttgctcttgcccaccctcactttcttgatccaaatgtgaaatgccagcaaataaataagagcattgtactctgatgagttctcttgagatgggggaaaaccctggggagaggaagctagaaacagcttttctgtttgctgtgactgctcctaattactggccagtagtagaagatatcatttagatgcagtagaatataaagataaagaaaaaaaaatgagagataaattctccatgttatcccaaatgcctttgctaacgtggaaatactcttggattgttggagtgcatttgaaatattgtgcatgatccttacaaggggacccctgactttggactcagggtagacagttgctgcatgcagatttcaccgccagactaaaagtgcaacggaaatgagtgggtgatgagagcagagcagccagttctttaattgaattaaaagctgggtgacatcaatgcagacacctgtccaattacagacaggccaaggtgtttaccattgctgtacaagcgattcgaagatgacagaaatctttccgcccacagattaacataatgaaggagaacagattacagtggatgccggccaaacaccttggttggcagctgggggtggggtgggggagggaggaggagtctgctgaagtatgtaagtagaaacggagtccttttttcttctctgaaatatgctcggctttaaaaaggatccattttgctttgtgtcttaggctcggtttccaggcagagcatttatacttgtctgcatttagtcagaggagttaatcataaaatttcaacgtgaaagcagactcctctgttgttttgctgcttctcagcatacggtgtcccattagaggtgcaaaagcttgcagagctggtgtcagctccacaatgattttgtcttaggtcgtcaggctgcctccaattattaatatttttctttggctcctttgaaacttgaggttacagcaaaggaaagagagtgttggagataataatgtatcagtcaaaagaaacaatgtctgtcactttgcttgttccctggaaggggcgtggtgggagtcaggctctcctatagtgagagaaatagccgagtggagctaacagtctgcaaaatcttaattttcagtcacccgtcaagtgctaacttttggtaaaccatactaatagctgctgggatagaggataaggaaagcagtaaaaggctatgccctctgtgttcaaggaattcccaaatcactgtgaaggacttctaagttgcaagttctctaggccaatgctcttcccctctgttaagtggaaaccctgagtgcacagagtttggagccatatgcagtaggcctcttaacctatctacggtgatgagtttccttcccttaaatcaagtccctgccccctgatctttcagcttgggctttctgcacccactgtggcccacaggacttcaattcaaagggaatctacttacttgacttcaaactcccttggtgtggcatgtcaggatttctcaatgttaggcattaatgcaaaatgcattatcgcttagcagtgagagttatggtcctgctggtgccaatgattttaatccggatacccacgctcctgtgtttcatgggatactaacacttttaagacatcaataatgcttactttatgcttattgaatgtttcttcagcttgccctcttccattacctagagggactagcaggtttcctgacatgattgggaccattttctgatttcacagagtttgtggctgaaaggcagtttgcgaggtcatctggcctgccttgtaatagggacactctcaaaaaaaaaaaaaaaaaaaagacttctctgggatgtgtcccaaacaaagagattcacaaccaaaccaattttaaagttctccctttcaggatatacttcttcagtataaaaaccccaagtgtcacaagtatcataaaaggcaactaccgcattttctatttttgggctttctgtctaggattcctttagatatgtcaattctctatttcccagtattctttttaatataataccaaaatatatatttaaattaaatttaggcttcctattatcttgaactggtaagtctgaatcttataaatgtcattgtctacttggcccgtatgcaaacattcttctttatgtatcaatctgttactgtaagaattcttctagttccaatattttcttatgttagaaaccttgtaaaaatcagttgtattctatagcaccttttccagacgcatatagcggaaacattgataaatgctttttgatgatgatatatcttcagagtaacactgtattttccagagagtacctaatctaagtagaaccctgacacttaaagcaaagccattaggataaccactcaatgatctcaaaggatatatccacaatctacatagtcttggagagaatgtgttactctctttctttggccatggcacaacttttcaacttgaatccatcctggtgaacactacttactgagaatcaaaggagataaaccacgtgtctccaacaataaaatgaccttgtcttgattccaagtgaatgaagaccacatatttgaccagccccttgcccttgcataacccttaatttttaacctgacaggaggagaaagcacagtgaaccattatagtgttcttcttcctgaagtaggtaattctaactgcctttaaggaaaattatcagttggtttgacaaactttgtctctgacacacagcatgatgaacaagattccctactggaaatagaaaagaaatggcactccagccttagaaaatgcagcacattttttgaaagtgtgatttacaagccatctaaaaccttccatctttgatccaaagttggcaagaaccaaaacatcagctttcttctttttctttctttttttttttttttcctttgttttctatttttcagctctcatttctcagggcttattattgtttcaccgggcttgaaatgggaaatgtgagcactttgataaatggcttgaaagatgatctagtttctctccagcatctttctttaagagtctcagggtttttctatgaaatacaatacaatttggtaaagatctctaccaaatcaaagctgaagaagcaagtttgctgagatgagcagtgcttgcttttaaggtccttaaaataaggagtggctaaaattaataaaagactctcactatacacatgttatacacaacgtaactcctttagtgaagacaagaaacattaaataaaacactaaagatcacttagtgagttgtgaactcaggatctggtttgatacaatccctctgaaagtctatagaatacccttccttataacttgatgtaacaattaaaatttcaacatttcactctagttatgatttggaaagaaatgtcttagtataaggaattttataaagccaggctgtaaaattgtacaatcatagagctgcttttatatttctcaatgataatacttcctgaatgtacaacacatcttcatgctaatgattgcagataaccaacctgtatatcagcattgtttctttttgggcatggtgttcctatgcctcagctgaagcatgctcatctatgaagggtgctgcttttcacatatgccccataggttaagtgatgataaagggaaactagcctcatattccaacatgcttttccttattgacattaggattaaaagtcttattctctgggggctgattcatttcttgttagcatggcgttatactaattcagccatgcaagtcatcttatttagaatcttacggtagtttccaacttggcaataggaaagacatggcaaatgccaaagatttgctaaagatagaatggctaaaacacattttatgatgataactttagttttgagcctggaatttgggtatcgtggtggaggcattacaaaatggaaaaatgaagcttacataattatttagaatgttgattcttggttggggcacgttgagtatgaaataccagtgggacatccaggtgtggttacatggcctgcagatagaaacccagaaccagggcttgggagagatgtgaagtctgtagatacaaatgtgatcactgaaagataaggcttaataagctagcaaaggcgagtgtttagaaaaagaaagaagcttgacaacaacccaatcttgagaaacaaaagctatttaagagactgtgagaggaacatgagtcagtaaaggaaacaaaggagttctcggtagtttaggagaacaactaaaaagttcaatgtcacagaaggaagttgagggaggataaggactgaggaagggctatttgatttggtatttaagggatcactgctgatctttaaaagatacaaagcgtcggccggccgggcacagtggctcacgcctgtaatcccagcactttgggaggccgaggcgggtggatcacgaggtcaggagatcgagaccatcctggctaacacggtgaaaccccatctctactaaaaatacaaaaaaattagccgggcgtggtggcgggcgcctgtagtcccagctactgtggaggctgaggcaggagaatggctccaacccgggaggcagagcttgcagtgagccgagatcgcaccacagcactccagcctgggcaactgagcgagactctgtctcaaaaaaaaaaaaaaaaaagaaagaaagaaagaaagaaagaaagaaagaaagaaagaaagaaaaagatacaaattgtctagtagcatgtagaggcagaaactgagttgcaatggtagcctaaattggaatggcatagctctgcactagagctcttgactggcaatactccatgtaagtattctaaagtcctgaacttgttcagtcttaatactaaccctttgaggtaagtactatattatccccatctcacatgtgaggcctgcaaggcctttccttcaagaccgagattattattatctgtttacagactaggaaactaaggcacagaagtctgaacaacttgcccatgtacatatggccaatcggcagcagatttggcatttggagccagcaatctggcttgagcatgggtgcccatttccccactactccattatgaagatgtgcatgtgataatgttagcttgcttttaagccatttggtggaaggagaaataacttcttaaaagaaagtaaactcagaacgtaggtcatgatctgggagatttaacaggaaatgacaatcgcaggggcaggaatgagagaaagcaggaggttctgacacgagagggttttgaaattagagagagctgaatttggcatgagatggtcacacatgtgtgtatattagttcgttggcttgctgtcttctttggccatgagctaagatgacggtgccaagtggatgaatattttcatgtagaagcatggcagacaggattcagtagcccacggagatgcctgggtcgttgctggaatgaagacttagagacagccctaggaactaagggcaagtgggaggtgtcaaagcaaagaactggtctttgctccatcctggcttgttgatcttttaattctttaaattttctactggggagggaaattatggaaacatgtatattaaaatttgtgtttgaatgatgaaagctgtcatcaaaattggcaccttaaagcaataatgtattctctgagcgattgaaggtttcatcaataaagagacaccacgagtggggccatctttttataaaaatagtcataatctatgtggttaggattaaagattgctctgaaaaacgtctttgcggaaaaacagtggtgagcaaaagcacaagttatattttggattttttttaattcacaggattaactaaataaggagtctctgccttgcttatgaacactagtaaacaaaatgtgttttcatttctacacatacttttaattgctgaacaaatctcatatatctaccagcaagccatgttaattcaatacttccacgtgtaacacttccgtttaagacaggtgtcttaattaaataaactaataattttgcaagtagaagtacaaaagcataattatctaatttgctaattgttcaactatgttaatttgcatacttgttagctacaacataaacaaatggtttgtatatgtatcgcctactgttaaaataatgaagccactcttgggagtagcatttttaaagtgtgttaataggtgccctataaaaaggactccttagttaaatacggttgaaaaatgctaggttaaagaaaattaaatagttttgtttctgcaggaggtctaggatcctggaatgagataatatatatcttagctattggaaacattgtgctctgcctcacgaactatatgtggaaccccctccccattttaatgggagaaacatcagatgctgtttgagagctgttttaacaataagttggtctcacaattttttctcatgagtccttccattcaacaatcagcagaaagggaggaaaatgactgaaagaggaatatgtttttgatttctgtctctggtctctttgtttttgtctctctctcttatagacacacacacagatatacacacaatgctctttattgatgcttatggtaaacacgcaaccctcttttgtccctttttattataggcatattgacaggcttgctacccttcaaaaactatgcagtaaccctaactgcttgcactttggctggctgtactgagagctcacatgcattgaacatctctactccacaagaaggtaaagtaatttcaaaggtcttgacttccacatttcagtcatgaataataaaataggagaagagctaaatgctacaaggccatttgctggcaaaccccaacctaatttgatgacaaagtgcattgccaggccataattgctccattttttgggggggtgcgaaaatgaatcaaactccataccctttaatgacatgcatctttaatagctgtaatgcagattaatgggctttttaattgctgttacattgttcatgcaagagccttgtcattaatatgaagcatctgaaagattaatgaaagcttcctcattttactatggctcagaagtaaatctagagacagtctgactaaaaagaattgattgtatggcacagtatgaaattgagaatcaaacggttgatttccatggtcttttttaactgctaaacagcagcacaggcaacaattatttcagtatgatgaaacctccaaatgccaattgaggcattattaatcactgcttagttccttccaacttaagtctcacttctgttgtacttggaacttacaaactgttggcataaattaaggtttcagaaagcatatgttaagaaggcagtgagaaagagaaaatattttagcacgccaaagtgaaagctttgctcaagcatcagaatgcatcacttcaagaaataacagctctcaaaacatttgaagcattgttacttcatatttctctattctggataagaggaattgtacatatcttatactgtctagttgaaaagttctttaggagatttaaacgcttgatctttagggaaaaagagtcagccagtctttctctctctctctttcccagtatctatatattccccccttcctcttttaaaccctttaccaagcaccacttgcactgaagatatgtaacagaaaggaagacatggacccataggatgaaaccaggacaggataaatgactttgtaaaatccttcttgtgacccttaatatgctgtattttttacctaaaccaatcagactcccctcacctgaactatgctgtcagtgacccagcctcagcattttctccatctggtctactggtaatagcactgtttttgttgtatcattgcatctgctgaggacatgattatcatcccctcttacaaggactttgaccagcctcaatatgggacaaatggccctatgttgcattattttctccgtatccactaaatcctttgtccagggtttacctggtacccttcataccaatttcaagctaagccccagagagatccctgctcttgtttatatttccttttttatttttaaagacattcccaaacttctaaatatccacgaagtaattctgaatttactaaatgatagaggagtttaggaaaatttaaaaaaaatgtttagttcttaggaccccccaattcattgacaactatataaaatacacagctctttttaaaaaaatatgcactaaagttttcatatgtaattgactaatttggttatgcgagctctggcaattcttatcattacatataggtttttaaaaatttatattatgaaccacattcaccagcattactcatctcagatcacaagctccttgaggctaggggactctatctgcttaatttgctttaataggtacagtcccacatagagattatgggttaatagtacttttggtggagtaacacaagcatcagtcaagtgaactagtgtaagtactcctcatccatcattgacacaaattctcataaatgtgggacagttatttaacactgttcctaaagcaattactgacaagctgcccacgaatcgggaatatttccatgcatgggatttcaggtttattccatgatttattggtttgggtctgaaaagtttgaattagaaaagtaaactaaaattagactctataaatcttttcttccacagccccacaagaggttcagccaccagtagccaaatcccttcccagttctttgctgctctcctggaacccacccaaaaaggcaaatggtattataactcagtactgtttatacatggatgggaggctgatctattcaggcagtgaggagaactacatagtcacaggtaagacctctagagttatcagcgaattgttatagtctatattcaaatataaacatacatatagttggctctcgatatccaggggttccatatctgcaaatttaatcaagaatgcttaggaaatatgtgaaaaaaataacaacagaacaattaaaaataatataaattctaaaaacatagtataacaactatttacatagcatttacattgtattaggtattctaaggaatctagagatgatttaaagcatacaggaggatgtggatagcctatatgcaaataatacaccacattgtaacagggacttgagcatccatgaattttggtatcagtagagggtcctggaaccaatctctcactgatattgaggagtgactgcacacacacacacacacacacacacacacacacacacacacacaccagataaatagagtctatagttatctgaaaatgtgtttttgaaattgggttgcttatttttatctcctgttaatcactccaattgtatgatcttgaaggtcatattagattcatggtgaaactgaagctaaaaaaatatggaaaagtgctcatgttacctccctccacccagggctgtcctactgtgtgttctcttctatagagcccaccaccccttacctaaatccttctagcaattacctttgctcagatgcagaggaggcctggaaatgcacaaatgtgctaagcacaaagagctcagcacatgacttctctgacttcagcagaccacaaggattgaaattgggagccagtgttttcccagtcaggctcacagtgtccagttggatcaatgacatcatcaaataaatgcctctctcacatgagctattagagtggtgcaaaagtagttgtggtttttgccattgacagtaattacttctgtaccacacgaatactttaaaatcctcactaatgtgtaatagtcttaagactcagaagtgtgactcagtgtggtttgaattttagatcttagaggaaacatagtatatctgcccatatcatattataaagtgtgatgatactgaaattaaatgaagtaaattcttgaaaaactttctaaatacagaagacttgcattatgtatgctgcctgtactgtgtttatatttgtattatacttatagtggttttgtatttcatattattttatatactgtatgtgactctcatgtgagacattattaatcaaatgttgactgatgaaaaaaccaaggcctagagatattaacttcttcataaaggtcataacaagttagagtcagaggtaggatgaattatttatgtattcactcactcacattaatgccaggtactaaggttgtaatagggaactggccagatactgtccctcttctcttggtgctcacagcttcatgggggcacatgtagatgctggagcaagtcgtgtggacagggctgtgtattcatccagttgcattctcaggtttacatttttttggcccccctctagtctgagaaccttaaaaggacaagaacaattacttttatattttattattcataattggatagaattccataatatttattctacaacataggtattattttacaccccaattttacaagtgaagaaactgagggaaagaaggattaagtaacccaaggtcacacagcttgagtcggaggctttggtactaacccaagcattccggctgtgttgaagaatgtggtcttaaaaacaagtgttttaacttgtcttagtttctgaatttgtaaaatggtgttaattacattttccagtattttaaagagaattagaactatatataaaatataacatgtcattagcaattggtaaagagaagttataattgttatctcctgtacaacacagagttcattgtaaaaactgaataggttaatcttactccaacagtatcttatggcatgattttaactaaaaattataaaccacagaagttatttcagaaaaaattaaatcacaccatggaaggaactttacatatattacatctttgaacctttacatatattacatttttacatatattacatctttgatgtaacatattaataattaacatacaaagcacttctgtgaccaagaggtaacattgcatgtaatgggatatcataacttttagaaccagaatagacatgtcctctgagaatccttttgctccccacgtgtgacacaggtatgccccgtatgcttactgattacctttatattacatcgctgctttttgtttgtgtcatcttgaataggactgtttgtttgttcatcggtttgccctgctgaaccataatgatcattaaggacacaactatatttgtttttttcattactgcatctcttggacctatcacagagtgggaatggaataaaaagtgttagagtgaaagaatgaagtcagatgattcctgggaataaaaacaagaagatagcaaaggggaactgatggaggataggattagggtaggaataaggcaatagagaagagagaaaaatggaaaagatacagccaggggaagagaaactaagaccccttccatgcgcctaaacgaaagctgcatcagtccacagggaagtggtgcagctaatggcaggtctcaaactgtgggccttgactctttccaaaatgtacagaactccatatgaggttacactggacaaaaccggaaaaagggcagtgtagggagaggaggaagaattcacatcaatttctaataccacctgcaaaatgacactgaattctgtattttgtttgtttgaattatcaagaacgccatgtgactataggccctgaagaaagattgtggtaaatggcaccatagtgtattattacaatagaagccccaaatataaagaaagtgaaatatttttaaagtgcctacatccatggtaatagattgattcttcaatggttttctatctttatgtaatattttaaagaatatatctccaatactacccatagcatttttttttctgctgtagctttcttggcatttcataagcaactatgttccttgttgctttcatctccaaatagtttaagatatgaagcatattgggactgcaatgctggtcaaggaggggaaataaactgagaaagttaatatggggttcaaagatgcacatgattattctaactttatagctagaaaaactgagacctagatgggttaagaaactctagtcagtaatcagaggaactaattcaaatgtagatctgtctggccccaaatcctctgcttttaatttctatacattctgcttgttgctcatattttattttcccttgccagaactctaaaagaaagaccccagaacacctgtattagtctgctagggctgccatgtcaaaataacaaaactgggtgactttaatagaaaagtatttctcacagtctggaggctgaaagtccgagaccaagatgttggcaagcttgatttgtcctgagtctctttccgtggcttgcagatagtggcctcctcactgtaggtgcacatggactttctttcaggtgacttcatccttggtattttttcctcttcctctgaggatgccagtcctattggatgaggttcccactcttacgaccacagattttatatcagtgatatggactaagttcaggtcatttatatttttaaagtttagctatctacagagactctcagagaagactaaataggaaagggactctgtctgtctgaagtcagcaagggagaaggctgtggagaaactgatctagccattgggatgggctttagcttctatgggcagtttaagtctacaccataacatgtatctatctacaatgctattggtacttactgcttgtctttgtgtcagggtatttgtgacatagtatcttttccacactgagtggcttgtgggtagaacttctattcatgatgtctggtgatttcaataatagtgtcagtttaggtctactaaagtggatctgtatagagctgaaatatctcttcatagagaaaccgagaagtggaatacagagtttactagatagggaaaataattgataatatctttaattataaaagtgataaattcttacagaagataatttaaaacatgcagacaagtaatacctgagaatcctgtcatattgaaactcataatatttgatggaattccttctactactttattcatgttaacaaaattgagctataacctatgtatgatattgaatacatattcccttattatattatgactatatcctatcattaaacatttttgtaaaaatattttgaaatgttttgaataacattatattccatctcatatagcatataatggatatttattaatgcatttaaccatttgagcaatagtatctaatctatctctattttaaatatcttgacatagatattcttatacataaatctttatttgctaggttcctagaagaatagctaaatcaaaggtaatgaacatttgcagaatgtttggtatagtttgtcacattattccaggaaagttgtcagcagtgaattttatattcttaaatatttgattattttacaaaaaaaaaagttattttattttaatttgcattttaaagtactagttatagtgaatacttttctgaataattattaaccttttatattttcctttcattcatctaatcacattcttgatgagcaaaaatttaattggggtaaggaataattttgagacttctccacgagctatcctgttttttctggttacaatcacccacactgtttaaaatgttttaccctctacaatatcagaaacttccctactaacttggtttaatgtcccctcctaaatattcaaagtgtcaacaatttttttctcactcctacttcatttacttgtagtttccctttaggtttccatatagaatcgacattcttcccgtagggtttgccagtggatcttgctgccatggggggcacaagcaaagtaaatgcatttcaattcagaagccacttagcatccaggtggcttggatttttttttcttctttttcttaaatatgaagcattaaaagtcaaaggcattgctgcaccttgagttagtacaaaatttattttaaaatgcatacagttcaaattttttaccttgcataggccataagctagtagtatggtgggtcagttctgacactgaaaaatgaatccagttagagaacctcccgaaggctgttgatgtttgctataataaatagcacacactttaagtcaaactttttcattctgtattcaaaggtaatggatttttcgtaaccatagtaaccttggtgtattctggataaatacgtgaggtatatacattctagttttatttttgaatataaactaccacattatgtattactaataatatgaaaaataggatgtaggttagtataatgacagcttaaactagtatgcattttccttctgcaaaaaataaatatttatcaaaagtataggttcaattaatttttctcccagttttgtggtattctggtggtgccatttatctttttttccaagatctccattaatctcttatttctgtcccataacagatttttaagaattttgaggtaaaaacaattgtactttaaagcttatgattaaaaacataatcgaaagattgaaggacctatattgatatcactagcagagctattgtgggccacttaagatgtgtgtatacagtacattcccaaacaagtagacaaaagaaatccttcatgagactgttcaacataccaggattgtttcaaagttcaggctggacagcacctgatcgatgatgactatccagactgtagccacagattattcttattttaaacgagcaccctaccagaaactggccgtttttaagaagtttataagatgtttccaaaaagcctacaaactttttagaaacaaaaatagcaagatggtgctaatcaggacaagtctccaccaaacccggcaaggaggtttatgcgagttgtgcttcctagttagaaaatactacctgaattgcttttggttaagccaacctaagccattgctgtggataatgactagaactccaaaagaggaaaggttaatagggacattatagaaaaataacaactatctcacaccaagccataacacgtgtgttttcaaatgtatcatctgataaatctacatagtcatcttatagttaaataagagtgactgatatctagaaccatagatagtgtcttcccactgctgttccatcaggacctggatttctatcactaagactgaggcagtaagatatagataatagcaatgtaatgagtgtgtgcatgcgtgtgtgtgtgtgtgtgtgtgtgtgtgtgtgtgtgtaattgagagacagaaaaataaagagagggtagaaaggcagatgtgggcagggggaaagagggaggaaaagtggatgaattctggtaaaatcatataggcaataattatttatgtctaaccaactaaaagtgctaaaactttttttttggtcttatttgccaaggtcaaagagaactatgtgtaaatagcaaaatagaaatgctcatcttaaactttccaaacacttaagtcttacgatgggaaatttattgacgaagaagctgtattgcttatggcacaataaaaacacatttaaaggttaggcacttctatccgagcgttataaggaaccttatcagcactctacaaatttgagctaaattatactcattcacaccaatggcttacagaagctcttttcttagcaaaatagaattttactttaacctagatattttctttattttgcatatttaaatatcacattgcagtacattgaaataactcctcttacataaaaatactattacctaaaggaatgctgttaacacgcctgtgttctgttacaagctctaatattaataaagcagagcatgtgaggatttccaggtaagatgacggtctcatccatgagtcaccatgccactctattacaaacgaggtcataccatgtttccctttgatgtctcagtcatatagtattaaattgtacaaagtctgagaaactttaaggacacgaaggaacaaaagtcaagctatgcaataagtagagccttcaaagccaaattactaagctactaactctgtgaccagagactccagaatagttgttcaaggttgttctatataccagatctttgggttaatgaacagtggatgctatactctcaagagtcttattcatcgagcaacaaagggtcaaatgaaatgaaataacttgtacagaatgtttgaatatcagttgtggttagctgtaaacaatacaacctaagtgtcgttcttccattaaggtgcttctataatgcacccgtatgtgaagaaataaaatatgtttaaatttacattttaagacccgtacccaaatattatatgatctgttaacctaattaaggaatattatgttcgtaaatgatagggaaagattctatgcttaaagggattttagaagaatcatgggaataatattcagttagaaaagcaatggagttaaatgctggaaagataacggaatatgtccttcagttgaaagtgttacaaatagaggtgtcctgttattttcagcattttgagagttgctatgattttttatgtacgttttaaagtgcttaaattgagttataaattaatacagaaaagtggacacatcttaagggtacagcttgatggatatttacaaaggaaacacatctatggaatctgtacccaaaacaagaaacagaacattgtcagcaccctgtaaagctcctcattttgtggcctcaaatcttgactcaggtgattgctttcctgagtgttgacaccataaactgattttgctaattttgtactcaatataaatagaataagaaagtggagggggggtcttcaaaaagcttatggaaaatgcatattatgaaaaatgtgaggatttcaattttttccaccaaaataaactcatactaacttgttataacattcctgaaccagatctagtttgaggtggtaagaaagttaagacatcagtctgaaacaagcccctaccagggcaacatgaattcagtaaaattgaagcaaggacaaatatcaaatttctggtgaagcttgcatagaagaatagtgaaatcattgatgttttacaaaaagtttttgaggacaatgccccaaagagatcggcagtttacaagtggataactcattttccttaaaggacaaggaacaagacagtattaaagatgaagcctgcagtggcagaccatccacatcaatttagaagggaaaatattcattttgtctgtttcctaattgaggaagacaaacaattaacaaccaacatcatacacatctcaattggttcactttgtacaattctgactgaaaaattaaagttgaggacattaaacttagcaagctaacataggaacggaaaaccaaataccacatgttctcacttataagtgagagctaaatgatgagactcatggacacatagaggggaactacacatactggggcttttcagaggtggagggtagcaggagggagaggattaggaaaaaaaaaaaactaatgggtactagacttaatacctgggtgatgaaataatctgtacaccaaacccccatgacacaaggttacctatgtaacaagcctgcccttgtacccctaaacttaaaataaaagttaaaaaaaagttgagtgaactttctacttagtgggtgccaaaactgttgcacccagatcagctacagacaagagcagagctttcaatggaaattttaaacaggtggaatcaatatcctgaaacattttatcaaataattgtaataggagttgaaatatggctttaccagtacaatcctgaaaacaaagaacaatcaaagcaatggctactaagaggtggaagtggttcactcaaagcaaaagtggaccagtcaagagcaaaggtcatggcaaaagttttttggggatgcttgaggcattttgcttgttggttttctggaggaccaaaaaacaataacatctgctaatgatgacagtgttttgagaatgttagccaaagctttagcattaaaatgcccaggacagcttcactagagtccttcttcaccatgatgatgcccctgctcattcctctcattgaacatgagaaattgtatgacagttttcacggaaaatcattaggatcttacagttctgatttggttccttctgacttcttttcgtttcctaatcttaaaaaaatctttaaggagcacccatttttcttcagttaataatgtaaaaaagactgcattgacatggttaaattcccagaacagtcagttattcagagatggactaagtggctggtatcatcacttacaaaaatgtcttgaccttgattgagcttatgttgagaaacaaaggttatatttttattttttaattccattttccatgaaatttttgtagttcccttatatgttctcttttgtcactgtctttttcttagagatataggagggagagtaaatcagtacaacaattttttgtgttcctgtacctacattcagaaccctctgatctacaggcaattgctaagatgttgttagttgttaaattcctgtcttccagaaagccattggaaaatttgcaaactgaaacatctacctctttctccaagttcagatctagaaaataattatagaaatgcttcatctgtgcaattagaatttagcacatgaagtcactgacccgtgtacactagcaacaaacaaaccatataaaccattctgagtttccaacaatgtaatgttgtgtgaccataaagtttatgatgctgtagaaaaatatttaatttggaaagataataacaacaaatattttacacatatttgagtctaattcgttaaaatatatgtgtatatacatagatacatatacatggatgtgtacatatacatatataggtatgtccccatatggacatataccaaaatactaatagtgattatctcttaataatgggagtctggtattgcttttttttcttttccttgagagtcgttcaatcttttaaattctctacagtttggatattagaagtcagattctttttgtaatgttattcccaattttaatatatgtgataaaattgatagaaaggaaagaaatttcgggaacctgactacacttaaccattaatacttatctctagttttccctagtcttcaccttatatttaatcaggttgatcgtcttactaatttccttctagccaataccatagatgacctctagcactatctaccaccatcaaaacgttatgtatatttgatgatctacctcaattcccacatcttcatttgactcatagactcttccatatcaaattcctacacatttgtcatttggacacattctatcttgcaatattgacttattttcaaaggagtaaatcttgattaaaaataagaatgtaagtgcattggttacagttattatgccattatttattttcaaaatttctgtaatatctcacataggaataaggacccaactggcatccaacaaactcactgaattgagtttaaatgaattaagttgaaaaaacactgagactcagtaaattaatattttagagaaaataacaataaataccaatgcataatttggatataattaacatgctaaacttggtaaacaattttattgaggtaggctttcctgtagcttaggatttttcatttaatcatccaatatatagcaaatatatacaaatatttgttgctcaattatgtgttttagcttgctaagactattgtaacaaagtaacacaaactagatggcttaaacaacagaaattgactgtctcacacttctagagacagggagtcccagatcaagatattggcaagactggtttcttctgaaggctatgaggaggaatctgtttcatccctctctccttgttttggttgtttgctggcgatatttggcatttcttgattgtatatgaatcatcccaatctctgccatcatcttcacataatgttttccctgtgtgcttatctgtgtacaaatttctcctttttataaggacactagtcatattggatttgggcccaccttgttgagctcatctgagctaattacaactgcagttctagaggctaggacttcaacatatgaattttggggagaacacaattcaacgtgtaactctagtgctgtgcatttgatgctgtgattaataacattctaaaactttcctgaaatacctaaaacatattagagaatttaaggtgtgtgttcacaatcagttttaagatggatatggcccatgacagtaatgaaaatatttagaaaaggtgataatcaattccatctggaatgctcccagccttactttttgcatcttcacaatcacatctcttacttccctggcttgctttctttgattctttataggagtgattagtttcctagtgctgcttaatacaatacccaaaatgggatgccttaacacaatagaaatgtattctcttgaagtttgagaggctagaagtttgaaatgaaggtatcagtaggcccattgtctctctgaaaactgtaggggagaatccttccttgcctatcccgccctccagtggtttctggcagtcagtggtattctgacagtcagtggtttctggcaggtgtctgtcagtcagtggtatcctggcagtcagtggcttgcagttgcgtcaccccaatctctgcttgtatcattacatagtgttttcccttcttctaaagttctctcctcctctaaggataacagtcatattcaatttagggctccccgtctttcagtatgacctcaacttaacttcatgacatctgcaaataccttattttcaaatgaggtgacattcacatgtacagggagttaaaacatggagataccttttgggaggacaaaattcaatccactacacctccattgactccacaactactttgccactcagttgaaactgttctcacctagattgtcaatgttctggtagtctccaattcagggacagagtggaggttgtataattcatgatgttttattgatgattcctccatctcagaacattcttctcttggtgtctgtgatacctcaccttctcaattttccctattactgttcaagctctggtgtgatctcttcctcattttcttccacgcacaaatgttggtttcccccaggattcctcttgaaacattccacacaatctccctttgaaaactcagtagtccttgtcttcagatatttttcctaagccatgaacatttttctcactgcatattgggcactcctgctacaagtgtttttactccaactccttaaaactgaatttattttatctgccacatcctaccaatgtgctcttttttctgagttttttatctttgggaaaagtaacactattcattctttttcccaaacaaaaacccagcattaatctttgattactcctccttcatccttcacatccaaacttttttgctgttcttgttttaagacagggtcttcctgtgtcacccaggctggatggagtgcagtggcgcattcacagctcactgcagcctcgacctcttgggctcaaatgatcctcttgcctcccgagtagctggggccacaggtgcatgccactacacctggctaatttttgtagagatgaggtttcaccatgttgcccaggctggtcttgaactcctgagctcaagagatctgcacatccagtcttaaaatccaaactgctgttgccctattacacttatcacctggctcctatctactttcttagccttatatcattcttttattctcatttatttctacaacactacattggttttctatttctgttggtttgttttgtgaaataccacatgccttttcctacatgcagacttttgaactttctgttcactctgactggaatttactttccccagttctttacatggctgaatcattgtcttccttgagttctcagatcttataaaaccttctctatatttgttagaataacctagatgttataagcatacacacatatacatacagagagatgatagtttttaatagtgaaaacacaataaaagtttatttcttgttcacttagcattgagtgcatacaaagtttggtccacagagtttcctttttctgcacagtcattcaggaatgcaggcagatgcagattcagattctgtcttatttaacacatgacttccaagggagctctggagttatttccattgctacagcagatgaggaagaagattgagagatcatcatggcagattgttatgggccaggcctgggagtgaaggtattaaagcaataccttgtactaactcaaagttctgtaaatcagaaatttgggtggatttaattgggttcgtaattagggctttacaaggccaaaatcaagagttggggcagtttgggctctcatctgaaggctctgggaaataattcacttctagactcattcaggttgctggctgaattcagtttcttgcagtggtaaggccaaggtccctgtttccatgttgcctgtcagtcatgagctgctatcagcttctaggggccacctcaggtcctttcacatggctccctccatctcaatgatggaggatatccagtccccctcatgcttcaaatctctctgacttttgcctccagctggagaaaacactctgctttaaattgctcgtagttagtttgcacccaccaggattcatttccttttctccatataaggtaagataatcataagtgtgatatctcatgaaattcacagattccacccacactcaaagggggaaaattgtatataggtgtgtgtcactgggagtcattcttagaattcttcctaccacaggttcagaagcagaatcactcaagcatggttcttaccctgtgaccttactaagccttggtttcctggtagaatggtaacaacagtacctactttagggatttagtataaaaattaaatgtgatagtgcatataaaaagattagcataggtcccataactcttctaaaaatggtaaataatcaacaacccatgctattagtcgcagaaataaggaaattattgttatatcatcataaatattcttaatgcaaaacatcctctgcatgcaaaaaaaaagcatgtctctaaacttcatgttcaatttaactcagaaaatatttgttgagcaggtactatgtacctcagaggttagaagttatttataaaactaagatactgtcattcttcctcaaatcattcccagttcaattgcttagacagaaatacataaaactaaatagaatgctgtccaacctgtggtaaattctgtaacatgtgtgacaacaaaagagaagggttcaacccagtgtggaagataaagtgtcacagaagaatgttcacaggctttagagtcgagtttaagaactgaggaacaggcaaacataaggaccatggttgcgtagtcactagacacagaactattaatgcgcatttcacaaaaattaaagagggaagagtttaatatgagtgtgcaccctgggtaagtaatcaatagtgagaagcaaggtgggattgagattatcaaaggtgctaagttatgttgagatatttgaactttgttctgaagcaagagagaaccattgaaggattttcagaaataccacaagacaatcagtgctttagaaaacacatagttggaacatatcattgcttcaacatagcgaagactgagtctgtgtagctgttttctccatttagcaggcataaggacaagtgggttagaacactaaatgcaagaagctaattggacttaacaatacagatggcaaaaggatgaggagaggagagaaacgcattatgtttatttgttaacagctctattgtattgtatttatatgcattagtcagtgtaaaataaaatctgcttattttaaatccttttaaatagtgtttaaatatttcctgatgacacaatctgctaaagtatttacccttggtgcagatttccattaaccttgctgtagatactaagcctacaaccatatatttatagggggctcaattatggggtaaagcctagtgacatcattataaaagcacatctggataagctttagggtctttgtctttctatctgatttaggaaatttagtaaactgtaggagaataccattattaacagcccctgaattctcagattatgaggatgtcctttctctcaaaataaaggaagagagggattaaaatctctaaagctgtaaatgatatagagaaatgcccagtacacagatatcagggatattaggggaatccagttgtgttggatatacaagaagaaaaaaaaggcagaaattaaattcaaagtattctttcctcatgtcttttgtcagtttttttttattgttttttagagagtctatataaatcctttggttccctaaaggacaaaattcctttgataattttacaaattcttttctaaatagtatctctgtattgtagattaaaaaaattaatacctaggaaaggtcaggtcacttctttcagtcaaggaatgactcattcatgaaactggaaagaaaacttctttttcactcaccccaatacttgatagctatcttaaattgaatatgtctttaacagtatatttgatattatcagtgtattttgatttatatatatatatcgtatatattatatatctgtgatatatatctatatatcatttatatatctgtgatatatatctatatatcatttatatatctgtgatatatatctatatatcatttatatatctgtgatatatatctatatatcatttatatatctgtgatatatatctatatatcatatatattatatgtctgtgatatatatctatatatcatatatattatatgtctgtgatatatatctatatatcatatatatatctgtgatgtatatctatatatcatatatattatatatctgtgatgtatatctatatatcatatatattatatatctgtgatatatatctatatatcttatatattatatatctgtgatacatatctatatatcatatatattatatatctgtgatgtatatctatatatcatatataatatatgtgtgatgtagatctatatatcatatatattatatatctgttatgtatatctatatatcatatatattatatatctgttatgtatatcatatataccatatattatatatctgtgatgtatatcatatatatcatatattatatatctgtgatatatcatatataccatatattatatatctgtgatatatatcatatatatcatatattatatatctatgatatatctatatctctctctatctatctatcacattttctttaaccattctatcagtgatgggcatttaggttgattccatgtctttgctatcatgaatagtgctgtgatgaacatttcttttgatttttattgtctgtgttaggacatcataacagggccctcctaataccattaacaacgcatcatgaccctggtaatggttttgtagctgaagtctagatagtttaagtgccctatcttattcatttgtacatattcaatatatataataactactattttctggacgttaagagaattgctgaaaatacagtggtaaactgcaatgaccctatatatcctggtttgtacactgttttatcttctgtttcagttaccttgcttaaatcttgtggctatatgacactaataaaagttaccaaatttgtaataaatagcatcacaaatatttcattgtgcttgagattgtttcaaaggttttgatttttctggctatacacacacatatgtaacataacataattaaaaatgtaatgaacatcactagactactagttaaacaagttatggctaataactaatatgtacacaaaatatgtggacacaatagaacaagcaaatctttatcaataggagaatatcttcaaagtgtatattgtaaagcacttgtgcagaaaagtatattctatattctgctaatgtttatttgtttggttatatgtatgtagactacatctggaggcatacatataaattcaataattgctaaattcctaggagaaaactgggtaatagtgacacaaaggtggagagagtcttaatttttatgtaaggtcttctgtacattttggctatcgtaccatgaatatatattaatgcattattcattcaaaattaagtacaatttaaaaataaaattactacaaaatggtaaattttaaatgttaaagaaaacttggaaaaatataaagaaaaattcaaattgtccacaattttatctaccagacacaatcactaattatattttggcttatgcatttaaagtctgtttttttattattaaagcacagatacaaacatataattgggaccagactgttttacaactttttaccactttataatatactaagcttattaccaaattgcttgctcagcattcttttatgtaacattttgtgtatgtgcattttaagttttttaaaattaataccacaaatgtgtttatgcattatttaaaatgatatattcttcttcctattttgtaaatgttttaatatatatgaaggatgctaaccatttgcatgcactctatatgacagttatttttttccgctttgtcttttgtatttttttactttgtttatggtggtttttaaattaagacatttttaaaacttgtagtcaattcaaatttagatatattttccagcatagtgtcttccttaaatagaaacacttagattttcttcacttcaagaatagataaatatttcctgagattttctttgataatttatactttcaaaaatattttcacatattccagcttctgtgaatatttttatttatttatttatttatttattcatttatttattgagacagggtctcactctgtcgcccaggctggtgtgtagtagaatgattttggctcactgcaaccccgcctcctgggttcaagccattctcctgccttagtctcctgagtagctgcgattacaggcatgcaccaccacacccagctaatttttgtacttttagtagagacagggtttcaccgtgttagcccggctggtctcgaactcctgacctcaagtattccgcccaccttggcttcccaaagtgctgagattacaggcatgagccactgcacccggccacttctgtgaatctttaaattacccaatgatgtgtataagggttcaaattttattcccattttctcagtgaagaaatagagattctgaaaactgatttgatatgcctgaaatcataaagttagttaatgtcatcgctaggactagaattttggtgcttacacaatgtgctgactcccaaatcgtaaatttctaccagatgtttaaagtaaaagaatgatgggaaatttcattaaactattaactatattcagtggtttcaaaatattaatacaacattgatatctttagtgcattatcaatgtattcttggagacaacatgtcaattaaattgtctcttattcaaatgttaacttcagtttttaaaatttaaagctagtctgctgattttcaataagagctgtctaatattgtgaactagtgaatttgaggagataaaagtggaaattataggtctgcagagtgtagcattgataaagagggggccatttcttccaagtcagtaaagaaaagtgatgaaacataaactggaatttttgtgattctactgttgcatgaccttataacacccctgttttaattaactacggacctgaaataataacgtatatttctaatccactcacaggaatggtaggtatattagttagctagggctgccatgacaaaatacaggctgagtggcttaaacaacaggaatgtattgtcttacagttctgggtgctagaagtccaaggcaaaggtttccataggttaggtttcctctgaggcctctctccttggcttacaaattgccgccttcttgcaatgttcttacgtggtcttttctttgtacacgcacaccctggtgtctttattcccatccaaattttctcttcttataagggcatctgtccgattgaattaaggctcatcataatggccttattttgacttaattacctctttaaagaccacatccccaaatatggttacattctgaagattagaatgtcaatttatgaattttggacggacaaaattcagcctatagcagagggtctgctttgcaatgattatgcactattactcaccaaggtagtaaaaattaagcaaacatttatatacacaagtttttgaggggataaagcctacagaatataagaacaaaatattttcaagaatgcctgtctgtggttctttcattaattcacttcttcattcatctttattgagtacgataatgaggcagggaaaatataaccatctgactatgaattgacctggtgcttgtagacatatgtggtttaacagttttccactttgtgtacccctctctcataacatgtagcatactctgctagaattattgattgattaacctcattgtctttctcactagatcatgagtactttgagggcaggaactttatctttcatctttcatcctgaagacatggatcagcatatgtgtatagtaggagaacaataaatagttttcagaatgaaggggagaattaattttttcatgaaaactagatgtcattatgtggagaatttatcagaatgccagactggtaaggatgttcagagacacagtagttgacctaagactaacctaaatctgtttgtatcacagaagtgtaccaatgcttgacatacattggataaaatgtttatttcctatttctctgtattgtttggccacatgactattgcaaagctcataagcacaaaatttgcacaaaacccctgagagatgccatccatggctacaaatacatgttttgattatattaaagtaaaaaaattgatcaattattttaaatattcaaggtagttaagtgaataaattctatgtaattacaaccacaaggttggtgcatattttagaaataaatgcttgttttactatgagaggaaaactgcgaatggcacacgacctaaacaagggcatcctgtttgcttggatgaaaattccatccccatgtttactataccttccactctcattcaaacctagaacaggagaaaaatagttcgagtttaaaaacaaatccagtagagtttaggaaagtttgtctcgtataccacacctttaaaaggctattttgcaatgacaatattcttgtattgccctctctatttttccctccctattgtatacatgagcccagcaacttctagaatatactagcacatatgaaatttttgaatatctatttcatgtagggagattagaaagtcactttctgccacttgtgtagctctattatgcaaaaatcaagaggatgcagatcataaatcccattagggtggaactctggatgtggaaaagactatatagataattttaagagatttcccctcagctgaatcattgctataaagttaagcatggtttttaaaatataaatcaaataaatggtttctataaaggcacatacctttactgtaaactgaactccaacaaacttttgagtggacatttctcaaatacagcatctattgaaaacttcctctgaaaaaacatttcataaaaattgaagcttgccttacatattttcatactatgtggttttaatgaccgttgtattccactctatcaccataaataaatatgtgactttaaaagatatgttgtaaataaaattagctcgaaaatactaacactaaccaaacattaatcacagaatttaaggagactatcagagactaattcagaaaataaaaatattgtaaaattactaccatgaaagctctaagaaaagttcatgataatttcagtgatgctaaggctacagaccaaatataaacttagaaacaaaagtatttagtctaagacaaattaaatgtgtatatattaatttattttctctgtttgatgggcatagaagcccatcaatactctgaatttatattttattaatactctcacaatttactttcatatgtgacttactatgtaatataaaaaacaaaagagcttgaaaaactgagatcagagggcaacaataaaatattaatgctaatattatcttgaatttttatctatacatatttaaatgttgttatcctcactgaaatttgttactaatcagtgaaactttagtatttacctaaattagttcttcttataagtagctcaatctccataataggagatagactataatttgtactttagcataaatattcttctaaaatcattcaccgttttatattgtaattgactgaaacaatataaagtggcttaaaatcattggtatattataaaacctatgtcagataaaacatggcatctgtgaagtttgggaattataacccagaacagtgtataattcaaaacagatacctgaaattatcttgtacacatctcgctatctgctatatctcatcacataaaatgcatagtagatgcacaaagtagctgtccaacaaatacttatggaattaataaatgaaggaatgacaaaaatgcttttcctcaatgtgctaagtcaaatacatgtttccttttataaaaatttaactatatgttttagatttagttgaaaaaatctatactggaatttacataattacataatacatattttaaagtattattcccagtatttatgaacattcattaatgagaatggcttctacattaaaagatcagttagcctctgctatttttgataatgatttaaacttgttaattcttacctgtataatgcattctcctttacaaaatgctggtatggccacttgttttatgttatcctcacaacaattgtaggtatagatgtgataaataatatactcttcctattctgtttttctttttaacaaatgagaaaactgaggcctaaagctccagtgattcactcatgtttacacaaataactctaaactggcgctcagctcttgctaattctttgtctcctcttttgttttgtttttgtttcattttgtttccctaaaccataatgccatccaatattatttaaagtttgcctgcctgcttttgcaatggttcttagctttccacaatagcaagtgcatcaaagaagaaaaaggaaatgattatatggttattaatcaaactcagatatggctagtaccacctttataagtgaaacttatataacaatctcagtttatgtcagtctcttatcccagtgtttaaagttttaaggactgagctgggaatgtgaggaggcttttgcttttcattttgtactctactagttttaatttttcactatgtgcatacatctgcaccccaacctttaaagaattagtttcctgaaaaaaaaggaaaatgcaattcatcgtacaaataaaagcataatcccttttattaatttttagctaacaaacacataataccatcctattccaggtactgtttttaaatgacttgtatctaaatgtaatgttaacgcatactttcgatgtgcataaatatagccaagcagtcctaaattcagataaattatcttccatctactgtatataattatatagtatttcctaatttttataaaatatggtttgtgtgtatgtatactgttactcaaatgaggttttgttgtttttctctcctcaaggtcaaaaacaatatctcactctatcttttgtgtcttttgttttttgatttttttttttttttttttttttgtctgctttgaacagtttttaagaggaaaagaagaaaaggtgtttgggggttacataaaaaaagggagaaagagacccaaatctcctgtctcttttatcacctacaaactgtattgattttcactttcctttcctaaatccatgctttaaagacattgtccatctaagaaacatagagtcccaaagcacaagttttgatgtagtgagcacccattgattgtaccttgaagtggatgtaggtaaacagatgacagatagatcaggtagatatatagatatagatatagatagatttatcttgaattttcctagatcccattaatctgaatgtacaaataagtctcattagttctaatatttgtatttcactgcctcattgccctcacctgctgtagatgatctctgcctccagcaaactaatcctcatgcatttctggggagtccatatgggttttctcacttgcacttaggatcaagctggacaccaattggctaagtgccacggttactccactgggcatctccatgtcccttctctggataaacaccatcatctatgggcataaggagcactgctattcttccattgctgctccaccaggtacctgagctctcccactgctgtgccaggtggaatagttttccaccaggggccaccttagatattcctcgtcaggtgagtaccaggactgctttgctaggtagagctgtcccagtcgattctaatatgcccctctgctgttatatctgtatcactgttctgtattctgctagtaccaaagctgaatgagactatgttaaaagtagtggtggaaaaatgtctttcttccttgcctccctctttcttaagtgagtcctaaaagaatactgagtagattttggtatcttaaaggtttaacaaaacagatcttctttgttttactctaaatacaaatctgagtaaactagccaaggctctcagaatgatctctctcttctgagaaccagggcaccatacctggctccgatttctctcatggtgaattcttcaaaatgttttccagtgcatgggctttcgctgggttatctcccacgttgttcacaatgttcagagatatctgagttaacagcacacccagaggtgttccctctttccatgactgtcccccacaaccccacgccaagaatgccactccccagttctaatggcagtatgctgctggtagcctggccacctgtctcagtccatttagtgttcctataaaggaatcacccaagactgggtaatttataaagaaaagaggtttaattggctcacggttctggaggctgtacaggaagcatggcagcatctgattctgaggaggcctcagggagcttttactcatggtggaaggtgaaggggagcagatatatcatgatgagagaagaagcaagagagagagagagaggaggaagtgtcaggctctttttcaacagccagttcttgtgggagctaagagtgagaactcattcactcccatgagaatgatgccaagccactcatgagggatctgaccccaagatccaaacacctcctaaaaggctcagcctcaatgttggggatcaaattgcaacatgagatttggcagggccaaacaaaccctatccaaaccatagcaccacccaatttgccagatatacccaggcagatctaaatatatcttacactcacaatcaggtcctccttttatgagataccaaagatgttccattagggttctcagacaaacagaatggagaaagagagatttattgtaaggaattggctcacatgactgtgggagctgacaaatctaaaatctgaagtctgcagggcatgttagcaggctagatatccagggaagagttagtgttgtagtcttgggaccaaaatcttcagggcacgtattagtctgttctcacgctgctaatagagacatactcaagactgggtaatttataaaaaaggaggtttaattgactcactgttccacatggctgtggaggcctcataatcatggcagaagagcaagagatgtcttacatggcagcagacaatagagaatgagaaccaagcgaaaggggaaacctcttataaaatggtcagatcttatgagacttattcactaccacgagaacagtatgggggaaactgcctccatgattcaatcatctcccaccgggtccctcccacaacacgtgggaattatgggagctacaattcaagatgagatctgggcagggacacagccaaaccacatcagggcagatgagaggtttttgttcctcatgacacaaaatgtggtgtcttttccaacaccacttcttcaattctctgacactcactaggcatgctatagttcagctcagttctgacagtaactacctggagttagagtaagactccatagatttaagagcccagtcccacaagactaccttcccttcagaggccaggcacaagtattgagtccccactttagccacaattctctccagctgagctacacagtcttgggttcccacaaccccctcttcagggttgataatttgctagaatgactcacagaactcaagaaaatgctctacttactattgcagtttattttaaaggatgcatataaacagccagatgacaaacctcctcaaattctgtttaggggcttttaggaggtttcatgacataggcatgattgatcaaatcattagccattgatgattgactcaatttccagccactccccttctcccaagcggttgctgattgagtagtgaagctgaaagttccaagcttctaatcaaggtttggtctttctggggaacagcccttattttgaagtagtctaggggccgtctgacagtcacttaattagaacaaaagatgctactatcatctttatcactcagaaaattccaaggattttaagagttctgtgccagaaacctggtacaaagaccaaatatcttcttatatcactgcaggccagcagactggaaactcccatagaatttttatcatgcagtcttgaggcagaattctttcatctttgggaaatttcaatctttgctctaaaggctttcaactgatcggatgtggccaacccatactatgtagggtaatttacttaaagtcaactatctataaataaatgttaatcacatctaaataataactttatagcaacatttagattggtgtttgatcaaacaagtggataccatagcctggccaagttgtcacacaaaagtaaccatcacagatgtattattttatttaaaatcatcagtattatatgaattaattcagaaataaaaaaggtgttgtcatagtgtgaacacttataagtgtctttcccacagaaatgtcaacagactgtgatttgaaaattgctgttttaaaagagaaaagctcatcattctacagaaatgattcaaagatagacaatccattaaatatcttataatgggccaaatactactagttgttaatttacacttgcaacatcaaacactttaccagctttttaacatgcaactgttgcatatgatgcattgtgttttttgcaagtaggtatacagcataattctaataggatatttatttacaacctaaccttacaatttaaagtctgctactccattgtgctcatcctacccgctgtcttcttatattcaaagctattaaggagtacttgctcagcatatcactccaaattaaactgcaagacattttatgatgaattaaatgggtgacgctctcccagcctttgtaactactagagcaagtatccaagaagcagacaattttatcacaaaattctgattgccaagttgtttttattaaatagacatacagtagagaatttaatcttagaaagcatctaacataaacacagatttctcgttttatagatgaataaactaagatccaatgagggcaactatttttttccaagttcatgcaggcagctaacaccagaacaaagactaaacaaagctcttctaacttctccccccatttttatcatccattgcattcattactacaaaattactacaaaattattagcctggtctttaatggtggccccaaagaatggtttttagtattacttccttcacttctttcgtatgtcctgtgctccagctaaactgaactatgttgaactaagctaaacatttctccttaagcttgtactgcattttgctacagtctttttgccaactcttcccatccagaatgtcttcactctctatctccactgctttaaaacctaagcaattttcaatttaagttctatctcctttttgaagtattgtatattcttctagccagataaaattctaggaaaatattgtcatacttgactgcataaagatttaaattgtctatatagcaaaataaaaccattattgaaatgataaaacaagtgacaaactagaacaaaatactttatagcatacttatttaataaatatctattgatagcttgctaagtaataggcactatactaggtgctatatccaagtaatgttgacttattagctttcaattagaaaaagagaaacactattagatatgggtcaattagataaacaggcacatccaaaaagaaaaaaatatgtaaatatagtcacagagataataataataataataaatgagatgctacttaacatttttcaaatgtgtaaatattttttaaaattagatttttccatattgattagaagatggagaaaagagctctttcacataatgctgctgtgaatgaaaattggcaatttatatcataatgtgccacagttttgttctgtatggtctcaatcccccctgtaaatgtgtgctctacttttctctaccttgtcctgagctttagcctctggattctctttgggttctgccaacgtaagacacaataaagagaacaacagacaggagggaatgaggccgaagtgtttattcctcaggctctgtgcttgcaagggtccccaggctctgtgcttgcaagggttcagatgggcagtagctgttcctccattgaggggaggcccttcctacagtacagctgtctttccagctggatgtggtcctcagcctaaggcagcaatggcttggtctgtgtttagccactagctgcgttcttattcttgaatgtgccccttaagcctggcccaaatcctgtaaatagtccctgacatatttctcttcaataattccatttcagtgtgccatcttctcccttgtcaggaggaccccaaatgatccctctttgactgggaaattctacttctaagagtttatgcttaaggtgtaattaagaatgtacccaataatacagtaatccatattaaatgttataatagtagtaaaaatgacactagtgaagcacaaaagagaaattaatccaaactgaaagagtttgagaaggtttcttatagggtgtggcatttgatttgtgtcttaagggtagcatgagactatgccaaaaaagaaatgtgtatgtcttgccacccaaaagagatatcttggccattgaggatagagattcattactttcttatgctatataaggcgtagtatagggctaggttgaaatagtattaaaataatatttaaggattgattataggttttcattgagaaccattctcaggtgatactttactaagctgacaatagacttagcactgcctggcaaacagcaagtagcagtcagtgatatagccatgattattactgaattaacagcatcttaatcttcactacgatatttgaaagggaacactgattcataaacctactcttttcctgccacaggtagtcaggaacttattattcttattatgtctcattattaacttctgttgcctaacaagatattatatattgtatgtcacatgaatattttcttacaaagtattaattgattcctaatcttgttaaagaatatgatagtagcaaatatccaactaattctgagagaaaaacctccagttttgcaagaaagatttagccaagttatgcaactaagtttgttcaaataataactctataaagttatctcgattatctcctctttagtttatgaatcgaaagcattgatgaagatcaaaagctaactgatgcctccctaattctatatctatccttgtgcagaggcaaagtaggggagtcagtaggatgtttgtgtgtgtgcgtgtgtgtttttgtatgtgtgtgtagatggagacagagaaccatagcaagatagagagagaacacgagaggagactgagagagaaggaaagagggaggaagggatggatggatgaaacgaggggctttctctcattttatatcataaaagtaaccaagaaaaaaatcctgggttcaatattttataattattacaaatggggtattagagatgttcaggaagccagagtagaaggcagctagctaagaatgctgtcagcctaaggagtttttcatggacgcctttttattctaaccagccacagaagaaaagagggaaatgaagaagcatcatccttcactatcacaactgacaataagggttctcccttacctcccacccccgcccccactacacacacacacacacacaaagtagtgactgaaaaccctcagcaggctgggctcccctaccacatgccacctgctgcaaatgtgttggaggcaccaggtcctcctttcttttttgccagttttcttattgcagaaaggttttactattcaacaattaggagtgtccaaggtgttaggggtcataagatacatccttgttctcaaagcgcttataacactgtaactactgatgactggtataaggatgcttacaagagaaatttattaaaagggcaactcagtagagtacaaactacgcatatgttgaagagagtcaggagatgtttcatggataatgcaaacattgaacagggttttcatgaaagggagggatgtggatttctctgataaggtggaaaacataagcacaaatggaagaatttgttgagtttagtatgtggtttgtgttcagttttaaatataagtccttatcatagcaaagcgatttcttttctttttgtttttgttttttccttttttaaattattttactttaagttctagggtacatgtgcaaaacgtgcaggtttgttacatatgtatacatgtgccatgttggtgtgatgcacttgttaactcgtcatttacattaggtatatctcctaatgctatccctcccctccccgcccaccccccagcaggccctggtgtgtgatgttccccaccctgtgtccatgtgctctcattgttcagttcccacctatgagtgagaacatgcggtgtttggttttctgtccttgcaatagtttgcccagaatgatggtttccagcttcatccatgtccctgcaaaggacatgaactcatccttttttatggctacatagtattccatggtgtatatgtaccaaattttcttaatccagtctttcattgatggacgtttgggttggttccaagtctttgctattgtgaatagtgcggcaataaacatacgtatgcatgtgtctttatagcagcatgatttataatcctttgggtatatgcccagtaatgggatagctaggtcaagtggtatttctagttctagatccagacacatgaaaaaatgctcatcatcactggccatcagagaaatgcaaatcaaaaccacaatgagataccatctcacaccagttagcatggcgatcattaaaaagtcagaaaacagaaggtgctggagaggatgtggagaaataggaatgcttttacactgttggtgggactgtaaactagttcaaccattgtggaagacagtgtggcgattcctcaaagtgatttcaactctacagatcagtttgaaagcacaggactggatctcagtgatggttaattgctcatctggccaaagaaaagcatgttgcaaggttaaggctcctatgaggaaaaggagagcaaggatgttcaggctgaataaagcccctgtttttattaattataaggtcagaatctggttctcctggaatcaaaatgctgagcaagcaattgtggagcaagggctacacaatggcagagatgaatgcaacctgatattccacatgcattctggcgcagctcattgcttttcaggcatctacgagaaacatatcaccccttaggtttgctgccgaagatgtgttctcactgaaccataacctagcagaggttctcaggttggaataccaaatagcaagatgatgtggtcagtgctacctatattgctctaaaatttttaaacatctaattgatgatttgtgggaaggttgcacagagagaagaaaggaaaaccaggaaaaagctgtgtttttaatttatgaaatattaagaagttttcggaagaagacccagacaatatgtattagatcataaagaagcaaaaaagtgctatgtaattttctgatggtagaaacaaataagaagatataaattcctcagtttacaccatgagtttaaagaaaatcatcacctacttactggttcattttgtaaattgagatcaatgaaattctctgaacaacagcatgaaatcaatcgtaaaatagcacataattcatggccagtattgtaaattatagtttgcttgacagtaatcggtaaggtttccatgcactgggatgcatttccttgtaacacgtctaaggataatgcctgtggatccatttctaatgcatattagagtgatctgtttttccctgtccacaactccctgtgtttgatcttatgcaaatgatgcaatcaagcaaatggaaaacaagatgttgttgctcaggggctcttacaaacagtggccttatgttttcagggtttccccaccctccatttacccaactcagatttgtgtacatacctgcaattgtttgaatccgttgatccatttgtgttgcccttgaagtgcctaatcacatctatagagacatattaccaaatcagttgcagttaagctaggaggagagttgtcattactttcctctttgctttaaatttcaaattggtggctttgtttatggcttcactctcaaagaatttatcagcctcacttccctgtaaccaatctttttttcatttctttttgttaactgtttttaaaaactctctcattccattcatacattttacacatgactactccttccccccacgcccaacctgatgcctcctcctcttctccatttttttccctttccctcatcatttcctcctgttttaccaagaatttcccaatcagatcaccgtgcaactttctctgccacatgtcaaattaggttctcttctctctctctctctcttttttcatgctttattattcaaagaacactagtaacatttcatcttcttatggaaatacattgagaataatccactttgggatggacagtacaggcataaaaacaacttggaactcaaaaaagctatttaatcacaatggttttctttgtattatgtttacagttttcagatttttaaaaccaaaagaaaatacccaatttctattgtagtgactttcatgtgagtccgtgtgaagagaccaccaaacaggctttgtgtgagcaataaagctatttatttcacctgggtgcaggtgggctgagtccgaaaagagagtcagcgaagggagataggggtggggctgttttataggatttgggtaggtaaaggaaaattacagtcaaaggggggttgttctctggaggccagagtgggggtcacaaggtactcagtgggggagcttttgagccaggatgagccaggagaaggaatttcacaagacaatgtcatcagttaaggcaggaacaggccattttcacttctttcgtggtggaatgtcagcagttaaggcaggaaccggccatctggatgtgtacgtgcaggtcacaggggatatgatggcttagcttgggctcagaggcctgacattcctgtcttcttatattaataagaaaaataaaatgaaatagtggtaaagtgttgggacagcgaaaattttgggggatggtatggagagataatgggcgatgtttctcagggctgcttcgagcgggattaggggcggcgtgggaacctagagtgggagagattaagctgaagggaggtcttgtggtaaggggtgatattgtggggttgttagaagaaacatttgtcatttagaattattggtgatggcctggatacagttttgtatgaattaaaaactaaatggaataagagaaggagaaaaacaggtataaaaggtctaagtattgggacgactcaggacatctgattagagagtgcctaaggagattcagcatagtcctgccagcaaagattatttatttacttcaagagttaagagtggcagtttggggatagcatgaggagatgtcagctgtgatggcttggagaaacagtgtaaactggcagtgtaaacaagagcaggacatgtatgagtagttgagaacggtgaataggagtatgactagacagaagatagtagggatgacaagtttttttggggcacagtctaagttggtctggtgtctggaatgagactggggcctaataaaaaggagcgtctatacaggagctcaaatgggctgtactttgtagcattccgaggacaggcctgacttctgagaagggaaagtggtaaaagtattgtccagtcctttttaagttggcggctgagcttggtgaggtgtgtttttaaaagacctttagtccgttctacttttcctgaagacggaggaccgtaagggatataaaggtttcactgaatactaagagcctgaaaaactgcttggctgatttggctaataaaggctggtctgttatcagactgtatagaggtgagaaggctaaactgaggaattatgtctgacagaagggaagaaatgactgcggtggccttctcagaccctgtaggaaaggcctgtacttatccagtgaaagtgtctacctagactaagaggtattttagttatctgactaggggcatgttgagtaaagctaatttgccagtcctgggtgggggcaaatccttgagcttgatgtgtagggaagggcctgaataatccctgaggagtagtagaatagcagatggaacactgagaagttatttccttgaggatagatttccatgatgtaaagaaaatgagaggttctaagaggtgggctagtggcttgtactgtagcatagcctgcctttgctggtgtgtgatgattaggcctggtggaactgccatcaataaatcaagcgtgggcgcctgtagtcccagctactggggaggctgaggcaggagaatggcgtgaacccgggaagcggagcttgcagtgagccgagattgcgccactgcagtccgcagtccggcctgggcgacagagcgagactccgtctcaaaaaaaaaaaaaaaaaaaaaaaaaatcaagcgtgatcaggctgaggaacaggaaagaaggaaatatggggaaatggggtgaatgtcaggtggatcagagagatacagtcttgggtgtcaggtgtggtatcaggaataatgtgggaggctggattgaagtccgggccaggaacaatggtaattgtgggacttaacaaagagtgagtacagctgaaggagccgtggagcagaaagtatatgcgtcaggtatgaggaagaaaatagattttggaaattatgagaaatgtagagagtaagttgagcatagtttgtgattttgagggcctctaaagtattagggctgcagcagccgctgcacggagacatgatggctaggctaaaacagtaaggtcaagttgtttggacagaaaggctacagggtgtggtcctggctcttgtgtaagaattctgaccgcactaaccatgcctatgaaggaaaggaattgttgttttgtaagggattgaggtttgggagattaatcagacacgatcagcagggagagcacatgtgtttttatgagaattatgctgagataggtaacagatgaggatgaaatttgggcttgattgaagtaatgggggctatctgtgaagctttgaagtacagcccaggtaatttgctgagcctaatgggtgtcagggtcagtccaagtgaaagcaaagagaggctgggatgacgggtgcaaaggaatagtaaagaaagcatatttgagatccagaacagaataatggattgtggagggaggtattgaggataggagagtatacgggtttggcaccatggggtggataggcaaaacaatttggttgataaggcatagatcctgaactaacttgtaaggcttgtctggttttaggacaggtaaaatgggggaattgtaaggagagtttataggctttaaaaggccatgctgtagcaggcgggtgataacaggctttaatcctttcaaagcatgctgtgaggtgggatattggcattgagaggggtaagggtgattaggttttaatgagatgttaaggggcgcatgatccgtcgccaaggagggagtagaggtatcttatacttgtgggttaaggtcgggggatacaagaggaggacgcaaaggaggctttggattgggaagaggggcagcaatgagatgtagctgtagtccaggaatagtcagggaagcagataatttagttaaagtgtctcagcctaataagggaactgggcaggtggggataactaaaaaggagtgcttaaaagagtattgtctatgttggcaccagagttggagagttttaagaggtttagaagcctggccgtcaatacctgcaacagttatggaggcaagggaaacaggcccttgaaaagaaggtgatgtggagtgagtagcctccgtattgattaagaaggggatggacttaccctccactgtgagagttacctaaagctcggcatccgtgatggtctagggggcttccaaggcgatcgggcagtgtcagtcttcagccactaagccgagaaggggtcagtcagagaaccttgggccagagttccaggggctctgggagtggctgccaggtgagctgaacagtccgatttccagtggggtccggcacagatgggacgtggcttaggaggaatcctgggctgcaggaattccctggcctggtggccagatttctggcacttgtagcaagctcctggaggaggaggttctggaggaaggcctggccgctgcagttcaggcatttggaagttcttgtgtgctggagatgtggctggggttcgtctcacagtggaggcaaggaattgcaacttttttctattattgtacaccttgaaggcgaggttaattaaatcctgttgtggggtttgagggccagaatttaatttttggagttttatttaatgtcgggagcagattgggtaataaaatgtatattgagtataagacagccttttgactttttagggtctagggctgtaaagcttctcagggttgatgccgagcgaccatgaactgggctggatttttatatttgatgaaaaacagcctaaacgctatctgatttgggataaagaaaaaggagcattaaccttgactatgcctttagctctagccacctttttaagagtaaattgctggtcaggttggggagggctagtcatggaacgaaactgtaagccggactgggtgtaaggaggggaggtgataaaaggattatagggtggaggagcggaggctgaggaagaattgggacctagcttggcctggcgaggagcagtctggggaggaggggagaggtcagatgggtctgtagaaaaggaaggttagaaagactcagccacgcttggacgcttggggttgagactgaggggacaggtgggagggaaagaaggaagatttgggacgagttgcactgggcacagagactaggaagggaccgatgtgtaaaagaatgcctagacgtcaggcacctcagaccgtttgcctattttatgacaagaattatttagatcttgcaggatgaaaaaattgaaagtgctgttttctggctatttggaactactgttgagtttgtattgtggtcaagcggtattgcagaagaaaataagacacttagattttaggtcaagtgagagttgaagaggttttaagttcttaaaaacacaggctaagggagaagaaggaatggagggtggaaggttgcccatagtgaaggaagcaagcccagagaaaagagagagtagagacacggagggaaggggttcaggggttcttaccctccagaaaagtgggaaagaggttggggcatggaaataagggattggggcacagagatataagaggtcagggtgtggaaataagggattggggtgcagagataagaggtcggggcacagaaataaggtattggggcacagagatacgaggttgggatatttgcccctcccccagaaaagtgggacttgctgctaagggtgaaggagaagaggttgggggtttcttgccccccagaaaggcagagaaggggtgaataatcagagaggcgtccctgcaatgattaaacaccaagggaaggctccttcccagtccgtgactggcgccagagttttgggtccacggatgaaacatgtctcctttgtctttaccagaaaatgaaaggaattgaaattaagagaagggagagattgaagagtggaaaggagaaagtggttgagggatagtgagaaaggttggagaagagagtaagaagaggttgcttacccaatttaaaattggtgagatgtcccttgggctggtgggtctgaggacctgaggtcgtaggtggatctttttcacagagcaaagaacaggaggacaggggattgatctcccaagggaggtcccccgatccgagtcacggcaccaaatttcatgtgcgtccatgtgaagagaccaccaaacaggctttgtgtgagcaacatggctgtttatttcacctgggtgcaagtgggctgagtccgaaaagagagtcagcgaagggagataggggtggggccgttttataggatttgggtaggtaaaggaaaattacagtcaaaggggggttgttctctggaggccagagtgggggtcacaaggtactcagtgggggagcttttgagccaggatgagccaggagaaggaatttcacaagacaatgtcatcagttaaggcaggaacaggccattttcacttctttcatggtggaatgtcagcagttaaggcaggaaccggccatctggatgtgtacgtgcaggtcacaggggatatgatggcttagcttgggctcagaggcctgacagtgacgacatagcagtcagatttcccaaaccagaaatctgacctaacaaactacttttttggtgtgaattagcttatcttaaaaacttagaaaacatttcaattgtacctaggttctgaaaatcttgtctgtgtggttatgataagcataggtgaggtgctggttgagtatgtggcattcataaatttcagtcttcaagacatatatgtatgtctctatctctgtgtacagttatgattttatttctataattcagtttaatatctgactttactcccatgcaacttagtagtaagtaaatcacagtcactttgggggtccccccacctctactaattatgtaaaagcttctggggtcttacctagttccttagcatctggagtgtggccacccaggatgctttctttctctgtgcaaagggataactattgagacaacccttccacattcagtgggtatcctcagtgcttctacatcacacttgggcaactgaaatctttacaaggttttctgtggccctgcctgaatacagacaccaaagtctttctttttgctctggtcttgcccccgacctgggactctaccttgaaaacaggggtcagggcccctccttcagagagcttgcacatttctacttccttttatccttattccatcaggcagggaattctgaattagggaagtggaagactccatacttcctatttctcccaacattatatctgagggaacagagtcttccttctctgttccctcagtcactctgtccagaagatttttttgtttttttttctgcctcctgaccagtcacattctgttttacagagaaatctattttatagttaaattctgattttataatttaattgagtgtactagttcgttttcatgctgctgataaagacatacccgagactgtgtaatttgtaaagaaaaagaggtttaatggacttacagttgcatgtggctggggaggcctcacaatcatggcagaaggcaaaaggcacatcttacatggtagcacacaagacagaaatgagagccaagggaaaggggaaaccccttatggaaccattagatctcatgagacgtattcactaccatgagaacagaagggggaaactgcccccatgattcaattatctcccaccgggtccctcccacaacatgtgggaattatgggaactacaattcaagatgagatttaggtggggacatagccaaaccatatcactgagaagcatttagataaaaattaaatgcagaaaacatatagggtcggtagcagggaaggacggaagaaataaaataggttagtatgacaatcagattgatctcagtacccattgaacaaatcctgagcattgtaggagtttagaagaggaagctctaagggcttcaatgtaaacccttacttggttcctcaagagaattgtccaaactatgaaaggagaagaaggaaaaacaaatcaatataatgaagagagtcacaaaggaacaacataattatggctgaaaagttccaaaagcccagttcaaactggaaaacctgaaattatactagactctttcagtgtgttcagtgacatctctcggaaacatcttagagatatgagaagtattagagacataagatgataagatttatccagaagtgggaactgggatagccatatagaagaggactggggatgtgaagaaccctatgtgacccagggagtatggctttgtaatggatgatcaaatttcattgatgagggaaatgaaactattgaaaatatctgggaataagaaggtaccaagagactggacattgtgtagcggcataggagtgattgcattgatgtgacaagtggaagaggtgggaagtaaccagtttgtggtcagagagtgcaggatttagatttagaatcttggaaatcattctgaagattatgaagtagtaggtgtaactatgctgaatgttgaataaatgaagtagaggtgaagggcattgcatttgaggaagttaaagtaaagccagattcagagatgagtcattattgaggatgttagagttgccaaaaagggattatgattgaaaagaaaactgagccaatgctgaagtcatagaggagagaagcagtgtgaccggagatgtgatgggggcatgcgttaactaggttggggcatatcttcttttaaataatggattgatattaactatggctattttttctccatctatgatataaatatatatcacaaaaaatttgaaaaatatatgtaacaaaaattaaatcctctatatgcactcactcagaaaaacattgttaacatttggtttaccactatctcctgttttgtttttattttttttattgtttctttcttttacaatgaagcactggtactttaaaattatgttttggcattcagacaggtacagctttgcctttttctcgtatttaatggtaaatctcctttgtcttacaactatagacccctacattggcccaacaattatattcattatattcttggagactttaaaacatgtttagacattactatatttctgagaaaaaaaaatggcagcctgggtagagggcatggggatatccttctggtcttgctcattcatttacaacaagtaaaattatgcgagttagtcatcacaccattcctggagatatcctgctgaacatgataaaaaatatttatctgaactcaagaagtttacattctcctgggaaggatataatatcaagatataaatgaaaaggcaatattgaacttgttttagtaattatgatatggaactaaacaaggtgatataacaagaacctggggatgatggtggccatattgttcaattatcaagaaagaccactcatagaaggatgaagctgaagcataagaaagagcaatccaagtacaaagagagagaaaatagatttcagtcagaaggagcagcacctgcaaaggcccagaagtgtgaacttgttgtgttagaagaacagaataatgtctagtctagtgtatgaaaaaaatagggagaatgttacatcaaataggatctcattgaccattattagatttcgttctaagagcagaagaagggtactacagggtgttactctgaagaatcaaaagatcactcatggtaaatggtcttgttttcttcattgggaaaattgaagtagttagaggataatgcccatagactctgctaccatctacccacctaccagtattggcacccacatagtctgcatcccctcccattactatagattgtctctgttccaagttcaactctttcacttttgaactagattctcctctttcacatattcaaggacaaaactccagcaatttttttctctttcatccacttcatagttttcccttcactagtgggtcatcccatcacatacaacaaatttttctctcatttaaattactttaaaaatcttctcttgattctacttaccttttatctattgctacatttatctgttctcctttaccacaaaactttttgaaaatgttcttttattcactgtttctaattcctcttctatttccttataagcccacttaagtcaggctttagtgctgacaagttcactgaaacttcaattgtgcaattactgatgactgccatattgttatacccgatggccgatttttaattctcatcttatttcacctttaactcttaaaaattacttcctttgactttcaagacaccataatctcaatgttttcctcataccttactggtcactctctgtctccttggttgatttctcctttactcattggcctcatatgttggtatcccagggttttctcttttatatctattctcactccgtttgcactcctagccatctatatgatgatgacttaccaaattatatatctcaagccatgaactcttcctgtaattccaaacttctgttcaaatatcctgacaatctcctcttggttatctaactaacatagcaaatgtctaattgacattcattatatgaattcttatcttcccctccatgccttcctcaaccaataaaatggttactttatccttccctttgctcaggtcaaaagccttggagtcaactctgggtcttctctttcatactctacctacaatgcactgggaaatcctgttagctttgcctttaaaacatattcagaatttaaccatttcttacttgattattactggcccccacttacttgatattacaaatagcctcttcagtgagatgtattcttatgctcttgctcactaccatctatacgtctggcagccaggatgatactcatgaagtccatgtttgattgcatgacagctctgttcaaaatccttagtgtcttcctaagtagaacctcttagattaaaaaccaaaattcttacaaagacctacaaggcctgcatgaactgacccctcattaaatctctaatatcatctctaacttacttcttcctaatttgttctgctccagccacctcagcctccctgctagtcctcaagagtgtcaggcatgtccctccttccacagctttgctctgcttgttccctctcttggaatggtccaacccaaaaattcccataacttttacactcatccccacttcaggtctttgctcaaaatgccaccttcccaatgaggcctctgctgactcttaactattaaaattacccagaacttctaattctccttcctctgttctgtgttttctgcagcagttttcatgtaatgcagcatgaacatcttaaactccgttacacattcactttaaagacatgctatcttctaaaatgcaacacctttcttacccataaacttcataataccttggataatctagaggcaaaccctaactagggatggaggatttgacaagctcaactaaactatttctatttcaatcctggctcactagccattctaaccctctcaagcaacatgagaggtatacttgttctaagtatactcacttcccatcctgaccgccccctgccccagtcccagttgttatagaaacggacacttcccactccatggaagaatccgggcacggataacaaatcctgaactaattgcttcaggaagctccttccatctgaggcggatattctgggtgggtttagggcttaggtgatcatagtcaccttcaacgcatgcagtttataggggaaaggtgagtggggcactctgtgataagcagacactgcgatatgtgataatatgatgatgcattcttgagatacctaagtcctaccttgagatacctaagttccagatatgcaagtctgtaccatggaaacatacgcaagcaagcatcgggcctttttgaatggagtaacttcttcaccacctacaagttgggtagctaaatccccaccccagcaaagtagaatgtaagaaagaaggaaaacctatcccactccaaagagttcactggccaaagaattttgtagcatccaatctcggttgcggctgaccaagacaatctgatatggctattatatatttcaaggtcacgtggatttggccacatggaatataatttctggctggagcatgttctttcagaaagttggatgtgttctcagttgaaacactataggttttctccaattgcactgaattacccatcaggaattcctctaagcttggtgacctccttggttttgctcctgcaacgggacttagagtcaaatccccagcttctctttttcagggaggacaaggaattcagacagatgagaacaatgagagagagaaaggtcaccagagagcgaagatgaagagaacagaggaatggcagatacaatatgttagcatataaacacattataattttggccaagattggccctgtcggtaggagtttttctttgcataaagttttctctcagtaaataatagtctactctctcggtagcatctgaggccactgctgtaatgattttttaacttcataagtttcctagaacgttggtccaaatgaaggcaccccagttatgtctcagtcgtgtacctatagtgcgactgttgctgccatctctcagcagtccctggcaatgccacactgcttcaccatcagcttcaaagtgtccttgaagtatatattctgactacattgaatgggagtgccccatctcaacttgcaaccattggattcctgtaggatagaatttgtaaagaaaacaaggtttaatcaaaagcattaagagtctcttcttgttgacaactttttgttctaaggtaaccatatttactgtaaattatttttttaatctctcttctagtgacctacatgtttaaccaattgattgtactttgcatgaaaatcaaagtgttctttccccagtttacttttgttatcagtgcaatgcaaaatctgtttgcctgaattaggttgcatttcattaatctcttcaatatgaaattgtggtggctcatggttaatgagatttaagaatctgtgttacttaaattgtgactaacttattttaaaagtatgtcagaaaataatgattgtttctagtagtgttaaagtattaatgattagtaagtcttggtacacctgactgaactttggttagattaccaagtgtaatgaagtgttcaggatatttcagaattgagttagtatattacagattagtttaatctaatacaagagaatgtggtatctattagaaagacagacaatataaaataccagggaagttcaggggagggagagattctttcagcctagggcactaccctagtctcatggtcatctttcagacctagctcgtttcattcattaattattcattcattcaaacacacatattcaaaacctacaatgtgccaggtattgtgctacatactaaggatgcaaaatgaatatattaccattcctgctcttaaggtatttagtgtatcatatagtcatgacacagtgtttttaagtgttaagctaaaagtatgtacaaagagaaagagaagaggctaatagctccatcttgtgctggggtgacagcaaggagtgttagggacatcacaaggaagaaacaggcatctgcactgcacctcgacaatttgaaggtcaaataatagtcaggtggtggacaggagaagaatggaatctgacaaacggaattacaagctcaaagtcattgttacaagctatgtattggcatttcaaaggcaactcctgttgtcttcaaatatgctttaaaataatttaaacatctcatttatttttaaacagagccattgaactaagactaaacttagcaaatgatttacctggtcacagacgttcaagaaaacagtaaaactgttaaaatgaaaaagtcaaaacaagagtttgattgacacttgtctatttaaacataaccaaagtatatttaagggatgaagcatcctatatgttattgctattgatttttatggctatttattcatattttaagccttatcttaacaattctctgagataggactatagtggaggagtgaaatctcctcaataagaagtataatgctgagtaaattcttgtttctccctatcccctagatttagcagtatttacaccccaccagtttctactaagtgcatgcacacatgtgggctgtacaaacagttcctgggtcctactgtacacagcacagctgccaccagaacacgtggattccccagttctgactgtcctggattctagaactatacacatacagtaagtagaaatgttgtctctctcacatgctggttcatgcaagaatctcagtgagttcaatcaggggaggagcttgtgacataaaattaattttattgtgattaaatgcatagaagtgattagttcagtggatctgggaacctttgattatcacttgccagcctaatttccattttgtctttatgcaatcaggctgagctacataggtacacagattccatgcaaacttcaataaacaaaaaactgaccactttcatgactgccttgaatattttatgtttggggcattatttgtaataatttggaattagaaagtatgtatatctttttgagtatagtccaggaccttcttattcccttattacctgcagttgatgtcagaaaggaagtttcacatataggcatgttctgatgatttctggtattactgattcttgtccatttcctgatacctgaggtataaggtgtactattgtgctgagctaaaatctaataggtctctcttatcaagagttaatacttgttcatatttatctcttctggactcagttttcttatctgtaaaataagagtttagactaaatgaattctgacatttattcaagccgaaaaatattatgattcagatctcattgttccatgtctaaattctcctgttggcttcattgtgcccctaagccaagccacgttacttagccaaaaagatttcccacgactcaggtgtttctcagcttaacaatttcctgtctgttctatgacttgcccttctcatttccactgctaagttgtaaccctcatctgaaatgccctctgttcttccttctacctatccaaatccaatccatctgttaagaataaaatcttatgtatctaagtagtgtgtcacttcattcaagaagtcctgcctgattttttcagcccttccagtcatcaatttcactgttttctctaattacatattaaccctgtgttggattcctggattttccaggacaattatattattccctcttttccccatatctaagttctcagaagttctgcttctgaagtttttgttctacagcttaaattcaaaataaatactcgcttatacatttttgtattgttagctaattaaaattacaggtaaccagatggcaggagccatatcacatttcctttttgcccctcagaataggcattggataactacttcagtgttttattttaaatgaatcaattttgagatttatgttttttaaaaaagtgtcacaaatccaagttcaaatgtgtcctttgaaaatcctgtatattttagttttgacttgaatgaatgataataatgtattttaccattcccaggtggaaacaaccaagaaaaataagtgggattctggaacgctatgtattatatatgtcaaaccatacacatgattttacaatttggagtgtcatctataacagtacagaacttttccaggatcatatgctacaatacgttttacctggtaataaatatctcatcaagctgggagtaagtttatttccatcactttctctgtccccattccttccacttcttctccccttcccgtggtccatcttttctttctctctcacttaaaaaaaaaaaagtcaaaatcttcatgtattgctgtttatactgaaaactctcttcccatcctaaatgtgaattctggtgatctaatacctacacatttattttatattatgcaaatgatagaataacaccctgagtcagtagattttcccaagtcaaagttgggattatcaagattttcaaaattacttgtagaacatcataattgttaagaactttttctaaagtgctaggattcataaggttatttccctgtggcatttgtattcatttaaaaaacaatgcacagtatgaaaatttagatcttatatttttaaatggaagtttaaatgaccgtcaaatattcttgattgttattacattctggtttatattatgctcctatctcagaagaacagtcacttaataaaaccccagaatcaacatagtttagaggttcccttagacaaacaatagcattttttaaatgcaaaaatagcacttttacacaaaggtcttttaaaagaccttgatattactgtggaatttatactcagtaattccttttgttttttgatgaaatataatcttttttaagtttaatagcacgtctgaaaataactgaatataaacatgagattgtccctatttgttttaaacacactcttcattttatagcaatacctatataaggatatttgctttgataaatgccatagaaaatattctgctcttgattatgaataaatttacatttatgtagacactgtgtatgcattcattttacttaacatgctcttgaatgctctaaatattataccatgagaaaataaactacactcaactattgctaactgtctgacttaacaccacaaaacaagggcaatcagacagtggttaaaaaaatactgttcaaaactgactccatgtgcctaggtgttctgcacagcagtttatgaaacagcactttggttatgtacagttttattacccattaagtaagaaatatactaacttgattttcaaatgctaacacagaaatacaaactattttcaaaataatggtagtatcaaaattaggaagagtcttaattttttggaagcaaccaaaactaaaccaaaaattgtgctcttggttgtttatcagaagtaggcaaatgacatagaacagattctcttcctagggccgtttttaggatgtgctgtgcagtcaatcaattcatatcaatctcctagattttataaatctataataccttgaaaaatacatactagtagattaggagtcctctgccctgagtattaattcagattttactacaaactgtgtgacctaaggcaaattcacttaacctcactgagttttattttcttcaagtctaaaattagaacattgaactaaatgatgtttaatgtctctgagccataaaattctatgatgctaaaaaaagtaatcccaaacactattctatggagtcaaatgctatctgtcagccgctgaatagtgttgatgcaagatgttataaagatgtgaaaatccttgccttaactcttggtagggaaataaacttgctcacattattttcaagttcactatatttattagggcagaaaataatatattttcagggaggattcaactaacagggtttttacttaactctgttaagcagtaaattaaatgaaccagaacattttaggttcatcctggttaattgagggattattgtatatttcacagtttcaatataataactggctttcaaggtcattagattagtagatcgagagcaggttctcagcaaagtggagttgcctttatagatcattttagcatgtcgactaagagctggaaaacaaaacataaagataacaaagcctttaagcagcatttggaatagaggaagctacacggggatttgaaccactatgatttaccctaggcttggagcaggtatgttacttcatgtaacgtcatttagttttcacatttgactggattataaactgctgaaacataaggactgaatctttcaaaatttgatctgcagtttcaagcacagggcctattggaaatgggaagctgagcaaacaattcctgaatgaatgatcaccaaggacatcatttcataaaggttctaagacttttgatatgaattaaataatttgcttggaaacactggaattaggaatggtgtggttccaaaacatactctttccactgcaaaaaaaaaaaaaaaaaaaaaaaaaaaaaaaaaaacataatatgttgctactctcaacaaaggctattttgaaatgtgataaaatgtgatagctcctaataaagaagacaatatgttaaaaataaaataaagaagctattaatacagacagctatcaagacaggtgttgcttgataattttcataccactgctagccatttgtaacttgatgaattctaagtattatatattcctgaaagattcctggaagtggcttcactttttaagtaattatggatcaagtggcctttttctttttcttcgtgctttaaaatatgttgcactcttaacatccccaatccctgtggacctgaaaacttactggaaaagagaatgctagttttggtccgggcacactggcttacatctgtagtctcagcactttgggaggcccaggtgggcagaccagttgaggccaggagttcaagaccagcctggccaacatggcgaaaacccatctctacttaaaatacaaagaatagccgggtgtggtgctgcaagcatataatcccagctactcgggaggctgaggtacgataatcccttgaacccgagaggcagaggttgcagtgatctgagatctgccactgcactccagcctgggcaatacagcaagactccatctcaacaacaacaaaaaaagagaatgctagttttggattgtcttaatagtcatgatttcaaaaataattgataaaattttattatttatgcattttattgtaccaaaattgaatcccttatttggccagatgttactcatcatttcaaggcagagttatgcctttatgaatttttcaaaatggctgtaactgagaaaagctataggcgatggttaaaacaacttattttaatggctctcaggctttcaaagaccttgctatttcataaaggcatttttaatcaaccccactattttgtttagtttttccagaccagaattttaatcagcattcagctgtattgaatgtagtggcctctggtgcgggcaggtcaaacaagatactgattggttcaatttcatttagatgatgtcagattagaccaattggaagcagctttaagaacatttattttcccatcaaaggaactaagataatgtcctgcttacttaggaccctctaaatgcatccaaaaagaatgtgggcaaaacaaaataaaataatttgcaggtaattctgttatttcagcagcctctttataaataatttcatttacaagaaaaatgctttcataaatgccttacattcttaagagatttctttgtcaagttactggtttatggatctcagatgacatagtagatgaaacagtccttctaaaccaaaggatgcttttacttatcctagaagacatcataaaatcctcaaagtaaattttaattcacactgtgttttaaaaatatatacttatatgttgtatagtatagaatttatttggggagagttagcaggggaaatattttagtatacaaataagaaaaaaatagtgacaagtagactatcagaattaaatcccagtgtgttacaagtttaacaataagaagctgcaacatttttcccttctaaggaaaaaaaatctgaaaaatgcaaatggatggattttttttctccctgagaagtgggaaaaatttgtctttgaccatttttcctttgataactcagctgtctcatatggcctcttttcctgccatattttctggtggacttttagcacatttgaaatgtctggggtcttcaactttttttctattttaatcgttgggcaattattttttgagctcacagtgacctgtcctaaagctttgagtcagagtttggccacatttgcaaagattccattctctagaggagtatggtttttttcttgcacagaaaggcacatgccacagctgagaattagaggaaacccacagaggttaattaggtacccaatcttaatgcaattttcatgctcaggccacaatttaacccatctgaaagttgcttaattaagctggtaagaaattatcctgaagacatgggctattgctatagtcttgtaatagcaagtgagattaatttccatgtttgttgaccataaactgttgtttatgcttataatgaagaatttgcaactagttgcaacaactttgcaaatagtagtgtactcccatatttaaaaaaaaaatctaaaaatcagtcagcttccttctgtctttggggaaaagaatatcgactactttaagaatcacaaaatcactcactcagtatcaaactgaaaaatcagagagacgcctaaagaaagagatgctttaattttttatcttagtaatatctgtcttacacaaaaatgagctaaatatctctgcttttttacattgtcttatgattttgctttattttctttttgattttggtaaaatttagtgccttttgaaagatttttaaactttgttgtatcaattgaaattgtaacttgaagagatactgaaccaagcttaagtatagttttcaaatatcattgttatataaggatataattactaatatttgctagcaaatatgggctgaaaaccccttaatgtatttatcaatttcctggagaagtgcttgtccagtaagtttaaaacattatttgcagtttattatgaaattgcacacggaagtttctgtaacattcatgttaccatttctgacattagtgatacttaattagggaacagagagttctgtgatcatgttaaatttgtcaaacatgttttaatgaagcctatctactctgacacataagtaaattatgtgatcctttaagccattaaacattcactcaaaaattgctttgtatttgttgttttatgagaaacattgttttatttaattttatttggtgttatgctataaacatattggtcacactgtagaaataaaaggcaattgtatttgctgcacatcttttcttccctagaagtcagttgttttgtcttaaagtagtcttcatcctctagtactttacttatgttatgtgtacacatgctgtgtgtgtgtgtgtgtgtgtgtgtgtgtgtttaattcactctgggaacctttgtgcaaggctaacttcagcagggctgtttatccagtcaatatatgccctacatctctaggctctgacttaagatgcttccttaattcatacattcataccatctcagttattctctaactattggggatggctatcttatgtcttaaaaagcaaattaaataaatgttaaatcttaacactgaaatgaatttattttggggaagtaaaggtagcactatataacaaaatctgaaactcttattatgaattctctttcctcaatgttcatgaaaacttttgggaccaagagtgaaatgagcatttttgcatctctgtttaggcttgcacaggtggtgggtgcacagtgagtgaggccagtgaggccctaactgacgaggacatacccgaaggcgtgccagcccccaaagcccactcatattcacctgactcctttaatgtctcctggactgagcctgaatatccgaatggtaagtgaactcttttagcctcaagttaaaaagatgattagcaaaggtaaattaatattctaaatggcagcttatatgtggtgcttaatttttaatgatcattttagcacataaaatacctaagatagtatcattgtctctagttggggagattgtggtttttaggctaacacacaattttggtggctcaaaagtgctcccttttgatagtttttgtgtactgcatctcattgtttaatatgctccaggagaggtgaagagagcaaacggggaggattcccaaagaatgccgtagtgagagtgacattgtattttcaatgactttctgtttttaaaagccattagttcttccttggcgaaggagagaggtggaaagttcatgtacatattgtgtcaaaacgcttttgatttaataagtttatcttaaaagaggccacttggaactctgtattttttaatatactatttataaatatttcaacatgctgtttttaaacaatgcatagattaaacatacatatatttatacatatttagctggaggcaagttttgtgcatttctaagcaatatatatgtttttgtacagtttagtgaattaagctagtcagttacgtttcactaaaataaaatctcattatgaagaatttgtaatagttttgggtagaaattgctttattcatttagtggaaatatctttaaggttcatataacatagtaccattgtttcacactgatggaagcttacttgacattaaatttcattcctctttgagacaaatatcaagaagacttttaatatagaaactcttttaagaaactcattactgaaaattgaaatgggctcttttagcacagccaaaaagaatgaaagaaaaaagttacagttttattagtttgtcttatgtttactatgatattaattattccagccatctcattttaattaaacttttggcaaatgcactagatatatttgaggtaatggagagaattctaataatcagagtgaattattatctctgctattgaagttattcctgtactattacaaattttccaagaaaaaataaatggatgcctatttgataccatattaagcaatcaacaatcttgttatgcttcttacttcacaaagtaccctagttcatagatgacaatgaaaatgttaatgatttatttcaattggattgctgtgaaatgctgttacatgatttgcatagtagagcacttcccttcatcccaattggttaatacaactagaactacaattgctctcagaatcttcagctgttcagggaaacattttccacattacaaagctctttgaatgttttgtgtatttgcgtatgttttgtatatttgcaagcagttttaaaatgtactcatcaagcaagaagaatttgggagattttggagatttgtattgacacttccatggtattccaaagtcttgtgtttaattagagtgggatttttagaactttaattgtggtacaatggttagacatttaaaaggcagttttattttttttaaaacgactttttttgtttttactacttctccccactttcccccaattttttagctttttgtttctcttgttgattgtctagagagggataatctgattgttggaaaacatcttgtctctccatctgtcttcgaagtccccacacctctcctcaaatacccaaagaataaagtctaaattttttagtctggtattcaggttactaccaacttgtgactcaacctgaatacacattgccttataacatatcttcctttctagccatgctggaatatttatggcttaatgttgggttggaaaacatgggtggagtcaaataggcctagagtcaaaaattgtttctgatgtatagtgactgtgttacctcaggaaattcattaacttccatggaccccaatttccttgattagaaaattgagattaacaggctgggcctggtggctcacgcctgtaatcccagcactttgggaggctgaggggggtggatcatgaggtcaggagatcgagaccatcctggctaacacagcgaaactccgtctctactaaaaatacaaaaaattagccgggcatagtggcaggtgcctgtagtcccagctactcaggagggtgaggcaggagaatggcataaacctgggaggcggagcttgcggtgagccgagatcacaccactgcactccagcctgggtgacagagtgagactccatctcaaaaaaaaaaaaaaaaaaaggaaaattaagattaacaatccctgtcatcaccctgtccttacctgtagaaatacaactcattcttctaggctaaccgtaggcctcttattccatgaaatcattctactcttccttaagtttaaagtaaactttccctcttctcttgactatgtgaactgtttctatgccttcataatggaacttcattcagcctgtgcttaaagttatttgcgtatatgtcaaacactcccaccagatgctaaggaccataaatcattaatttctctttcactccgcagagcctaacacaatgttctactttttattggtacgcaataatatttaattcatttaatgtttcttgtggaaattacctttgatcagtggcatatatactccaaagccctggctctttaatgataccaagagagatgatagaagtacttaccatccagtgtctgcaatatatttgttcaaaatgcatttgttcctaaaatatatttttctagctgtgtagattctgaggctgggtttctcttttgagaataccgatcttgcatttgaccaaagaatttttaattttcttttctggattatgcccaattcaaagttaatggtaccaggctcacatggcaatatatgctacctaatggttgctttctaatttctgaatatgctgctgaagagaaatacaattggagaataagatagacttcattcttgtgtaactaaataaaccctttcaaaagattttaaatggtatttctcaaacttatctgattcttagaacaatcttgggagcaccaattgaataagtagattctaggctccaccacagacctcctaaataatcagaatcttccactgcctcggttatcatcaaaatacccctgggtatttactacattttccaactgagacctctcacaaaatcctccccctggatttttgttacatcttaaacccagcatatccaagttgatttctcctcatggtctccatctctctgcttgctctttctcctgtattccctctctcatggatttgcaccacccagccctgccagccagtatactgggcagcagtcttcaccttaaaccttgctcacccctgactgctgtcaccacacaacccctcgactgcacttctctagtgaaggccattaatattgctcacccagatcgcttcaggagcctcctcatgccatgcaaaaaatttgcatttgttcattcaaaatatgtattttgatgacctactaggttccttcactcttatctatacagtgcatttccttgcttcttgatctcaaggatatcagagtcctcggggaaaatatccatataaatgaattctcacaaggtggggaggtgcacaaggtgccaggtacacagagaagcagctcctagtggttccctatgagatgtggacatgtcatccctctgcatcctcacgaagatgttgcaggaccagatatagacatgtgtttagtctgaaacaggtattacttgcctggttttgcacactcaggtttcaaaatcttgactctgttaatcagttatgtacctaaaggtatgtttgttcactagggatttataaacatgaacaaagacttgttgagaaaaattaaactcaatttctataatgagaactaggtatatttttatgcttgcctatatatgacaaaatatgaaaggtataaaaagttctaatataaatgtccagtccttgccaatcaaacaattggtagcctttggccagcgtggcttaggaaacattctgtccttgtcataactgattctgacttaaatgatcatctcctactcgtgaaagtctgatggtaatccttaaccaatgctttaagaaaagatcctctccccttgttatttcagttctcttccttgtctcccagcctggtcctgctccacagtgtctgtgctggaaagcttgctagttggttcagtacatacttcatgagccctgagaatttttcctaatttggtgtcttttgttcagcagtgtaccagcagctccaagaatagtgcctgagacataataattgctcagttaaaaaattgttgattaccattattaaagaaaaaaacagaaaacaacatgttctggaaaggatgtggagaaactggaacccttaaatactgttggtgggaatattaaatggtgcatctgctatgaaaagtagtgtagaggttcctcaaataattaataatagaattattagatgatgtagcaatcccacttcttgaaatatatccaaaagaattggaaacaagatgcattgcagcattattcacggtagctacgaggtgcaaacaacctaagtgtctatggacagataagtagataagcaaaatgtgatatatttacacaatggcatatcactcggccttaaaaagaaggaagtcctgtcatacaatatgctctggatgaaacttgaggagattatggtaaatgaaataagccactcacaaaaagacaaatactgcatgattgcacttacgtgagtttatctatagtagttgaatgcacagaaacagaaattagaattacggttaccaaggtctgggtggaagggggaaatggagagttgctgttcaatgggtttagagcttcagttttccaagacgaaaaagttctacaactctgttgcacaaccacgtgtatgtagataacacaatggtacacttaaaatggttaagatgcccaattttacgttgtgctttttactgtaataaaaaaaagatacagagaggatgtaataaaatgctataaactaaactagaaaaaaagattaagaacagtgttagtttaaaacaaaaaaaaattgctgattaataatcacatagagatctatgcatgaagtatgcattttttaaacaagggtgagctcatactatttgagttgttgtggaatttacttttctcacttcacaatatggtgcaaacatctttccttgcagttcagtggaacgtgacctcattctttcaaaaggcagtatgcaatcccactgaatgaaactacagcttacaagacccatctttttattgatggacatttctgtggtttttgctattacaaacaaggttacttgctattaattgcctcagtctgccaagtacagtctttaagtactgagtcattatcacttgattcacacctaaggctttgcttgccttcaaatatgtcctgcttaattctagtcccttgcttcacatacctgcaaaaatgatggtgtgacactccagctctgtttctctaatcagagtcctttgcacccacgttccctctggcaaaggtgttctttacaggctgtgatttcagacatgattttaaaaccgctgaaaagagcgacttttaggtccaaggtctataggaacccttattatgtaggaccttgacgcttcctttgtaagaccattagctatcacagagaagtagcacaaaggattactgtctaatacatttgtgacctgtattgtgtagattgcaattgcgtaattaaagttctgcttttgagagcttccaaattctcatgagccatattcctttttagaagcttaggccttagaatcctgaaatatgttttttcttcacacttcaagtctaccttgctaaaacagcatagctatctgactatgccaaacttattcgtcattatctagcataacatttacagtgacattttaaactaattagaatatgtgttttttttaaatactaactaaaaatatagaatataaaatgtttatcttttattaatagctataattccttgtaactaacctctatctttacctaagtaaatcgacctaaaatagtttctttattagactgagccccatgagggcaggaatcatatgtatctttttcactgccctagtcctggcctttggcagagtgccacggagtagaggcatcttataaagctgtcgaatgaattaatatttaccgatgatagggacaataccaaaattgtaatagtgttgatgtgagaagcatattcatatgcaatcatacaacatacacaaatgcacactgtgagcacatttgatgattatgtaatataggtgggatgatttcaaagacagcagagaggaatcttcctcttggcctgctgaaggcttaaagcacacacttagagacctagtccttttgcttaagatttcatcagcctggtaatctgtagatttcctaatgaaagacagcacatagacttgtcttgtttgtgctctgcatgtctcagtatgaaaggatatgtttttactgtggtcaggatttgttaataaccacatgggcataattaagagagaagcatgtggctgggcgtggtggctcacccctgtaatcccagcaatttgggaggtcgaggtgggcaaatcacctgagcctgggagttcaagaccagcctaggaaacatgatgaaaccctgtctctaccaaaaaaaaaaaaaaaagaaaaagaaaaaagaaaaaaaaaattagccaggcgtggtagtgtgtgcctgtagtcccagctacttgggaggctggggcatgagaatcgcttgaacgtgggaggcagggtttgcagtgaaccacaattgtgacactgcacttcagcctgggtgacagagtgagaccacgtctaaaacaaaaaagagagagagggagaagcatgagagctgggcacccattagacatggtctagcatcttcttgagaagtgaaggggacctgagaagcttatggaaatattttcctaatttagtctttcatattggcccatctttgtgagaatttatatgtgaacatatgtcaaaatggtggcaatcatgtcaaaaataatagaaacatcttagcaggttgattatttttgtagacttacacgtagtaccttgaagacaatagaacgttatttaaaaaaaacatttggctcagtgttttgagcttatatattctgtcaataatgggtggtagagaaatcaattaactataggtctcttatacacactctatacatgttgtccttcacattaagagatgatgctatagaaataagttttcataatgtatgcacatgaagatatatgtataaatacaaattaaatattctatgcatgcatagaaataaatacttgatttcctgttaacaataataacattagtaataataataatagctataatttataagaatttgccaggcactttaattcccataactagcccatgaaataggtattgttatctcacaaatgtggaaacttagatttataagtattaaacagtttaattattcaaaatcaagacagctggttaagcagaaagattgtataaatcaaagcaaggtgtgaatgacaaaaattcacggttttattcactatattatctgcctctactttttgtagaaaggcttataatgtagaatttaatctagctgtatgaaaacaaaattttgttacttttacttgttcaatgtcctgttcttagtgccaatatttaaaattcataagatctgtgttctggtttttctctggttttggagagataactgtttgatatttcatttgattttcttactttttattttaaaataactttatttttaaatggtcaaaatgtgattctattttctttcctggaaatgctcagttttaataagtgaaatggattatagaactcagcgaatcacttaggaaaactgcttgacagttttgagcaaaccttgcgtaacttttatgaaacacctccagtcagtttgtcaggtagaatttcccaagcacagtcttttttagattccgttgattccatttttaggagagcataacagtaataaggcattatcccgcaatgtgaaagctcttctctcttttcctttttaattgaaggatcaagtattcacacagggagatatctgccacattcaatcagcatctggaccttgaggggagccctcagttcatattcctattgccatgctgcactggaaaagacaaacaaatatgtttggagcatctatattcactacacatgttatttttatgacacactaaagcattgttgtttaattcttacagtaaacacaattcttcagcgtaaatagagataccttgtattaaatttacattgtattgtacttgcattgaatttccttggttatatatgacaacctattgagcaccttaggaaatacaatttgacataacatgatgaagaggcacaaagatatatatcccagtggatatgctttatggacaattatcatccagcttccctgtgaaaattaaacaccttaaaaaccctatcattatggaaacagaaaggtgataaacttgaaactccttctgttgtacagccaatgggaattaagtatccattttgtggattatccattgaagaactgaatgtctagaactagattaaattaaactgaattaagccagaacctgaccccctttgccacatggcatgttacagttttattttgcttcagctgtcttactgattattagtgccagagaataagcaagaaaaagcctgaaaaaatacaatatggtacaatataatagagtaagtgattttttatggtgaatatttctcttttgcttttctagattcactctttttcaactctgccccgtgccctgtaaggctgaaccttcctcacagtggcaatgggcttcctctctctctggcttcctgttggtttgtccatgggcagcaacggcaaaagatgagagggtgagaggagcatggagtctcagaactcattctccctggctctctttctgcatggctctggattccagggttgcattcctccagtaaaggctacatttcctatttgaagcctctttctttctccaggttcctgaatttgttctcaccctttcctctaaaaacataaagaagtttactggctcctagccaactagttaaaatggtctaggaatcttagctagtactagctgggaatgctttattgtcactggttgctttcccttaaccctgtccgcatctttgtaaataggagttccactaaaatcttttccatgccatttgagttgtcattggtttcctgttgaaaccctgactcattcctaaattttatttaatccacatttaacacggagaggtgttttttgtgtgtgtgtgtttgtttttttgatgggggggtagtgcgtgaagataaatttaaaatgactttcttcatgctaagagtggcaagaataaataagtaaatgaacaaaatttccattttcttaaactttgtttcaatacaatagacatcttaaaggccaataagaagagccaagctcaaagattctagtggcggcttgcttatctaataaacccatcatatttaatttttcaaataataatcaacttattgatatatctttgaaagcttttcacttattgttataaaatatttctttgttatcattagtgaaataatggcttatgacatcttcctcttgatgaagtagctctgagtgccaagtttagcttataggtcagtttcggccaggcgtggtggctcaagcctgtaattccagcactttgggaggctgaggcgtgtgtatcacctggggtcaggagttcatcaggagttcaagaccagcctggccaacatggcgaaaccccgtctctactaaaaatacaaaaattatctgggcatggtggcaggtgcctgtaatcccagctactctggaggctaaggcaggagaatcacttgaacctgggaggcggaggttccagtgagccgagagtgtgccattgcactccagcctgggcaacaagaacaaaactccatctcaataaataaataaataaaattaaataaaaatcaaggtcagtttctcagataagccctattacgtatcctacccagactaggttagcatccacctctcccttctctatcccatgttttccttctatccatctgatttttaaaaagtaaactttacatcctcataatacctctaatgtctgttctttcgcttagattgaaagttttgtgaaggaagtaaccatgactgttctgacaacttctgtattaccagcatgcaacacaatgtctggctcatagtagctaccccatagttactgatgagccagatgactaccagaaaccaaatctaaatccagcagacttacaaaaattattttacagtatttagtaaatacttgtttctttgcactttctggacttcattggaaaggaatgaattttaaatgaaaagatagcatacaaatataagaaactattggctaatgacagatagtgtgccacggaggaatacagacctgcctaagcttgtttttgagagatgttagtttagtttttacaagagaagtgcagcacatgacataggtcagaattggaggagatagtctaaggtgagcttcctatagcaagtaaaactttaactcatactagaagcaaggggacagttctgtgtgtgtcccttctatgtgcacagtgcttattactaaagcacattcatatatgctcacttgtttgattctcagatcaactgtcaggccaccagggcaaggaatattaccccattttgttggtcaagaaatgaaagcttagtgagttttgctatctaaccaagttttaaaggtacgtggtcatgacagaagggctgaagtggttggaggaagatccctgaaaaagaagacaattggcttggaagcttttgactttgttttgaaatagttcccagaacaggagacgcactcaagaactaatttgttgattgaatgattacttacgtaaatgtatatgcacaaaattgatacttcaaaataattggccatacaatttatcctgttctgcaacttgctttttttctctaattcacatggagtaaacatctttttatgtcaatagcatagtgctccctcatttttcctcaaagcttagtaaaatgccattgaatgaaaccacaacatttatagaggctatctggtaaatgattaatatccattccttgctacagctacatctcattaatgccagctaaccattaattataaaagatgttgacaataaggtttggtgcttggactagtagatagtcctcaaatggattctcatttatttggatttggtatactccttgaggtagtgttgcaaggagtgtttagccaatagttatatcctgaggagtcctcaaggcctgaggagaggaccctgaactagctgttaagcctcctcctctaaaacaaagtcaaacaacagggttgaaagtcaaagaatgaaagagaaaagaaagctgatgtgcctattttaatatcagacaagactttacagtgagtagtattattagttataaaaatgtagtttcataataataaacgagttactaaaattaacatttattttttatcaaaatatactataagggcccacaaagataaataataagagagatgatatttagaacacatgtaaccatcagaaaactgtatccagaatatataaaacatgcctacacatctataacaaactggagttaacatctgaaaagtcatttcacaaaagaagaaaaattaaatgtctgataaacataagaaaatgggccaacttctgtaataatccaaaagtaaaagataatacccaaacaagataccattttttacatctaatactggcaaaaatttcaaagtctgacaataaggtctttttgaggatatagaacaatgagaactcacatggactcacatgtacactagaattgacatactttcaaaaagagatgagcattgtctagtaaaattgaacatatatcaacaattcctctccaggacatttgtcctagaaaatttgtgtatgcgcttcaagacacatatacaaaaatgtgtataattacattgatgtcatagccaaagtataaaaacattctaaatatctatcaagagtagaataaataaataacatttgccctgtaggaatactacacagtaatgaaaatgagtgaagtatggctactctcaaaaacatgtatagaacacatgaatatcatgttacacaaagcaagatgaaaaaattatatatacaacataactctattaatataagttagaaaaccatgagaaacttaattatgttgttaagggatgcatttctcagtagaaaagcaaggacatggttcttcaaaagtcctcatatttatctgtgaggaagggaaagggatccaattatggacaggagatttctggggtgctggcaacattctattttttcaacgtgagtgatggttacatggccttttgcttttaaatttgtcattaaaatagaattgatattgtatatatttttatatgttatgttttattacgtgatttttaaaatgtagaaagaataggtatatggaagccgtaaagttgtatgcactgtagagtctgaatgcttcagtgccgacacatagctctaccacttcctagctgtataacactggccaagttaccaaacctctctaaaagcttttcttgtcatctatttctctcatctaaaatagaacccattccactatcaagagtttttcctgaagattaaatagtacttgattaaaacgctcaatccagtgattattgctttagcataaacttctttggactttaaagtgtttgtgtcttcttacctggcatgctcccctgcacaacagtattttttaatttaaatattttattttgagataattacagattcacaagaaattacaagagacagagattccatgtatctttaattcagtttctcccaatgtcaacatcttctaaaactataatacaatatcacaactaagattttaactctgatataatcaagacacagaacaattccatcacaagacatggtttcttcttatcctcacactgaaaaacaattccctttttaaccaggaacagaagggtaagttagtactttggaagtaggcttttatgagattaacgtcattgttcatgtttgataaaggaacactcttttctgaatagtgattttatcataccatattgcaatctaacacattccatccctaagtgtcacaagttttttttttaattaaaaagaaagtatatataactgctaaagatatttcttctgccacagactactgctgaaatgcagcattcccacatccctgcctcattcacgactacttcctatacattcaggaaaagacgtctttaataattatttttcctgtttgatatttttaaccatctcactgttactacctgcatgggcttccctactccagtctattttacatgtgattctagattattttttctgtatatgactttatcttgtcgctagtcagttcataaaaacactaatggtctcctgtgcatcataaaatcccaactccttgtagtgtcattcaaggccccaaattccctttgaagttttgttttctattagactttatcgagtgatatggtttggctctgtgtccccacccaaatctcaccttgaattgtgaaaatccccatgtgtcatgggagagaccccgtgggaagtaattgaactatggggggcatgtttttcccatgctgttctcctgatagtgaataagtctcatgagatctaatggttttataaaggggagttccctgcaaaagctgtcttacctgctgccatgtaaaacatccctttgctcctcctccaccttctgccatgattaggaggcctccctagccatgtggaactggggagtccattaaatctctttcctttataaattacccagtctcaggtatgtctttattattagcatgagaagggactaatacatccagctacaggaataacaacagattattgatctatttgggatacctttactgaaccttgcactttcttacttctaggcagtggcaaatgtcattttcctcaccagaagcatcttcctgagacataggtatttcacatattacctttcatgggagacttagcttcatcatatgacttattgaagtccccactaccgtatgtggaagacttgactgctctaaaaagcctgtaacacttctttagccagagtgattattccctgctagagggtcctgtacctactgtctactatttaattatgtcatttgtttggcataaagttgttgtggtgcttatgatccttgtttaacccttgaattgttatttaattatacctatgtttaactcttttcttacttccataaaggtagatattattcttattctgttcttacttcccaaaataccaagtatagtactttgcacttgattgactttcaatatatttatattaatctttttattaggcttatcttgattgctttgagaaccagagcatgttcaccagttcttaattcaagtgaaattcctaaaaattttagaagaggaaattagaccagaaacatataacaagagtagtgaccagagtggggtaagatggccagtttccacaactaaatttatatttgtatggccctgtaaaatgggttagcccctctaagaatccattccctcctctttacagcaatgacaacaacaattcttattttttggagttgtcagtgttaaagaaaataatgcataaaagcatgtaccctattgtctgtctcaaagtaagtgatcagaacattttaattttcttttttaagaaaggctctcactttgtcacccaggctggagtgcagtggtgcaatcatggcccactgcagcctcgacctcctgggcctgagtgattctgccacgtcagcctctcaaatagccaggaccacaggcacatgtcatcatgcccaactaactttttgcattttttgtagagacagggctttgccacattgctcaggctggtctcgaactcctagactcaagcgattcacttgccttggcttctcaaaatgctgggattataggcatgagccaccatgcttggcctgagcatattttaaattactttaaattattttgggctggtggcagtggctcatgcctgtaatctcaacactttgggagactgaggagggtggatcacaaggtcaggagttcgagactagcctggccaatacagtgaaatcccgtctctactgaaaacacaaaaattagttgggcgtgatggcgggcacctataatcccagctacttgggaggctgaggcaagggaatcgcttaattcgcctcctgggaggcggaggttgcagtgagccgagatcatgccactgtactccagcctaggctacagagatagactccatctccaaaaaaattaattaattaatttaaaaaattattttaagtattctataattttgaaaatacttacatggcatttcaaggactcaaaatcttactttccccagagctactcataaatcaaaactttgtttaaaataaatgaaaacagaggtacaacataccaaaatctctgggatgtagcaaagacagtgttaagaggaatgtttattgtgctaaatagctacctcaaaaagttagaaagatctcagtttaacaaactaacatctcacctagaagaacaaactaaactcgaagctagcaaagattttttttattactgattcaattttcgaacttgacattggtctgttaagggttttaatttcttcctgattcattctttggaagttgtttgtttctaagaattttctctgtattttctagtttgtgtacatagaggtgtttataatagtctctgaggatgtgttttgcttgtttgttgttgttgtttttggtaggaactgcctcccctaccccgccgaaaaaaaagaaaaaaaaaaaaactggaccaggtggattcacacccaaattccaccagatgtacaaggaagagttggtaatgattctactaaaactgttacaaaatatcaagaaggaaggactccttcttaacactttctatgaggccagcatctctctgatagcaaaacttgtcaaagacacaactaaaaaaggaaactacaggccaatattcctgataaacatagacacaaaagtcctcaacaaaatactagcaaaccaaattcaacagcacagcaaaaagttaattcaacacaatcaagtaggcttcattcctaggatgccaagtttggctaaacatatacaaatcaataaatgtattcataaatctccttgagttggaaatatatttaaaaacatgattcatcatataaatagaactaaaagcaaaaatcacacgatcatctcaatagatacagaaaaagctttcaataaaatccaatataccttcatgataaaagccctcaacaaagtaggcatcaaaagaacatacttcaaaataataagagctatctatgacaaacccacagccaacatcacacagagcaggtagaagctggaagcattctatctgagaacaggaacaagataagaatgcccactctcaccactcttactcaacatagttctggaagtccttgccagagcaatcaggcacaagaaagaaataaaagaaatcctactaggaaaagaagaagtaaaactatctttctttgctgatatgattttatgcctacaaaacccaaaagattccaccagaaagttcctggaactgacaaacaacatcagtaaagttttaggatactaaatcaatgtgtaaaaatgagtagcatttctatacaccaataatgttcaaactgagagccaaatcaagaatgcaatctcatttacaatagccacaaaacagtaaattcctaggcatacatccatccaagaaggtgaaagatgtctacaaggagaactagaaaacactggtaaaagaaatcgtgtatggcacaaatggaaaaatgttccatgctcatgaagtggaagaatcaataatcactaaaatggccatagtgcccaaagcaatttacagattcaatgctatttctatcaaactaccaatatcatttttcacagaattaggaaaaagctattctaaaattcatatggaacccaaaaagagcccaaaaagagccaaagcaattctacacaaaaagaacaaagctggaggcatcacattactcaacttcaaactatactataaggctacagtaaccaaaacaacatgatactggtacaaaaacagacacatagaccaatggaacagaaaagagaatctagaaatacagctgtgcacctacagctatctgatcttttacaaagtcaacaaaaataatcaatggagaaaggactgcctattttaaaaatggtgctggggtagcttgctagccttatgcagcaaaccagacccctacttttcatcatatacaaaaactagctcaagatggattaaagatttaaatataagatctcatattataagaatcctagaggaaaacttaggaaacaccattctggatgttgtccttgggaaagaacttatgaccaagtcctcaaaagcaattgcaacaaaaattgacaagataaacctaattaaactaaagagcttcagcacagcaaaataaactatcaacagagtaaacagacaaattacagagtgggagaaaatattcacaaaccatccatttgacaaaggtcaaatatccagaatctataagaaacttaaatcaacaagtaaaaaacaaataacctcattaaaaagtgggtaaaagacatgaacagacacttctcaaaagaaggcagacaaacagctaacaaacatgctcaacatcactaatcatcagagaattgcatatcaaaaccacaacgagtaccatctcacaccagtcagaatgactgctattaaaaagtcaaaaaacaacagatgctggcgaggctgcaaagaaaagggttgaatgcttatatactgttggtgggaatgtaaattagttcggccactgtggaaagcagttgaaggtttttcaaagaacttaaaacagaaccaccatttgacccagcaacccattactgggtatgtacccaaaggaaaacaaatcattctaccaaaagaaacatgcactcgtgtgttcatcacagtactagtcacaagagcaaagacatggaatcagcctaggtgcccatcaacagtgggttgaatgaaaaaatatgatacatatacactacgaaatactatacaaccacagaaaaaaccctgaaatcatgtcttttgcagcaacatctatgaagctggaggcttttgtactaagcaaattaatacaagaacaaaaaaacaaatattgcatattctcatttataagtgggagctaaacattgggtattcatggacataaagatgacaatagaccctgaggattaatggcagggaatggggagtaaggactgaaaatctaactgttgggtactatgctcactatctgggtgatgggatcattcacatcccaaacctcagcatcacacaatatacccatgtcagaaacctgcacatgaacccccgaatctaaaataaaagttggaaaaaacagctattgatacatgtcctgtgttctagttaaagaaaaaagcatcttcttaggcttcagtttaaaatgtccactacattatatttgttagtttttgttactctgtttaggaatctgaggtcaatgaagttaaaattgtcatgttaataggtgttttagacttaccgcttattaaaagtatgttttaaagctgaatcatacagtgttttatattatattgattttgtttatattgaaatcagcttaatatgatgtgtgtgtgtgtatcaatataatactagtcctacagtgtggttccacaattcatccttcagcccttcctccatatgctgtcaaatactgtttacctacaggatgccgggtaactctgtgtttgtgtgtgtgtgtgtgtgtgtgtgtgtgtgatctcacctatgttaaagttagacttcattctcatccacctctcaattagatacatcctggatactaaaaagtttttgagcagttgaattaactgtcacaaatatcacttaatttcattctcagcttatttgccatgtattcatcttagtctaagcccttctttcaataactgtctgctcttcctatatccatagttccagatgtcaaggttatctagcttctcaacatagattgctaagggttgacttactagagtcagatagacaaaaaaaaaaaaaaaaaagaagaagaagaagaagtaaatttggagaaactgtcactgagagaggatgtagaagaactcaaacaatgacacaagaattggtaaggtgcagtcactgagtgatgtttagggtaaaagctgggtaagaaccctgtatctcatcaatcactgaagcattatagaattagagaatgtagtctttggtgtccataatcaaagtttcagtcttcacaaaatgattcaattatattcattatattctgtgtgagaagacaggtaagtgtgtagaacttactagaaggatttccttcaaaagtggttaagatttttagagttcatacttaaggggatgagatttagtttcaatgaaaattaacttctataaaatatctcatttcccaatatgtcagataaatgagatattatgcacataatcctaacataaaagacattctctgttccccaattatgtaagaaaagggaactattgatttaggtactttgtatctcagttaaaaagcaggtcaaataggtagcatttcaagggtcttatggtttctttaagagattctgtaacacactatttgtacataagatttttttaggatcaactgactgcttcacagagagcctgacatgtaagaattttttggtcattgttattacctgatcatatcttttttccctttaaattttctatgtattataggtaggtggtgttttcactatgtgtctttcacttcttagctttaactcatttgtgtctttgtgtgtcaagtactacatagaattaaatcaaataccttccataggtattcataaagttaccatagatggtcacaccagaaataaagaaaaacagatactggcagccacatctttttgtgtgtttagagctataagtggtacctgagagtaaaataaaagatctttcccaaaaatttggaaataagggaaatggacttatcagaatggtaaactatacaaggttgtcttcttaaaggaaaatgaatcacagcagtggctttttaaaagtattaactcatttaacaaaaaatgctttaatcctaaatgaatgtattgtcctagatctgattggtataagagaaaacatttcagatattcaaaacagagggtattttatacaagtaggttgttctcaaggtgttgtaaagaagggctggaagaacaaaagggaaaggtggcaggtactggatggaagaaaaggatgattgacaggagctggtgcttactgctacacttgccgatttgacatttgaaccattatgggacgctgccccaaccagagctgaaatgccaacaacattccactaccgaagaggcagaaaatgcagaagagatgcttcttctgtctggaatgcttgaggctgcaggtgctttgtcccctgctgacacagcagctgtcaacaaagccctcagctcttggagctagaaactggacgttttctttcttcctgcttctgtcctcctcacagtgcctcccactggcaaaacccaatagaaggccaacaagcaagagagttggaaatgtagtttgtagtttgtaggttcagccgtacagaacaggctatagaagcgtggatgtgtagctggggcggacgtcagatgaatcaccttcttagctactcggcattcacacacacccttgtacttttcaccacctttcattaccaatagcaatcactctatgcttccaatgaacatgatactactatgctttgtacaaatgacggtgctctcacctccctcatcacattcttatctgggtgatgttaattccccttttagttcaggcacaacccatctggatattcttcaacataaaaaaactaaactataaattaatacccactaaccctatttacatgaatcaatggggaaaggaggacggaaaattggctacaatatacaaatctctgtgtcataagcagaaataaaatatgatagcatttataattcttgtttatataattagttgtgagaccatagctgatatttacaacttcttctctttgccctcagctggtagttcatttgtttgtagttcttttatttttattttttgtagagatagggtctctctatgttgcccaggctggtcttgaactttggggctcaagtggtccttctgctttggcctcccaaagtgttgggattacaggtatgagtcaccacacccggcttatttggaattttttacttaggccactggatcttcattactaagggggtctatgtccttcctgttctatcttgattgggttgctgcagattttcaatgcttatatgattggacctggtcatataaagagatgcccttttgaatgtcctgactgacaatgtgcagtaggaagccagtttctcctccaatatgataccttttctctttgcctgttataggaatgctatgaagagagggttaaaaagaagccaatgtgtaccaggtgcttagaacagtgcctgatacattatgagtcatatagaatgcattaacaaataaggtcgatttacttctggggcatatctattaagaatatcttcttttagaaagcaatacaaattataagtatgcttcacttattaatttttgatctggaacacacatgacaacagttaacaggatgcaatagaaagattctcatgctggaactgttgggttctatttctgtctctgtattaattaggtttacagtttgatattcaagggtaacatctattttatcctttggtaagagacagagtttagacaaggagaaataccagagtctgtgatttaatgattccatgaaactagaaatcacatcaagagtgcttgctttcttaagaccttctttgctattgtctagtagtcatactgaaaggcaattattatcttcccaggtgttatcacgagttatggattatatctagatggtatattaatccacaattcctcagaactcagctatcgtgcttacggatttgctccttggagtttacattccttcagagtccaagcatgcacggccaaaggttgtgctctgggcccactggtgagtatctaaatttacattctaggaatgtgttaaatgtcagatgacactgaatattaaggaagaagtaagtggcggtgactcaccctctgcacagctagcctttcaagcaggatgggagatttttctttttataaaagttcatttaagagttactaagattttatattcgacataaatttcaagactgaacataggtccagtgaagggcagagtctacattttattgaaagaaagataagttggctagtgtagtaggcaaacatgaaatttttcctaatttagtgacatattgaaggcagatgtttttctttctaatcatgggctcaacatctaagtaagtttaagattaagaagtaaaaataattgaaagtccataagtgccacaatatggcaacactgctccccaaaaagtaatcaattaaaaggttgagtttacctcatctgttaggataaaatagtttcatgtgatacagcttcataagaatggtatttaaaattacatcaatatcagcttttgatattcatatttcagaaatctatatctgaaatgtatatctatatttcattagcagttaacagcttgacaagattatgttttctattcctaatataatttttcaaacccaattaatagcacttaattatcataaactagcaggacagtcttcagtttcaaaacatcacattacactttggtgcatttttcttgattaattagattttgcttctttagatggaaatgctcattagtcttagatattttttggcaatgtttgctaatgccctatcattttagtgcatgctgtcttcactgaagagtatattatataaatattaccttggaagacagctctatgttttaatttctgcttccttatttttgatcacacctctctttttgtttcagagattggttgctttccaagcagctaacaccatccatcggcggagctgagctgtagtctttattgccattaagcattttatagcccagacccctctgatggatacttacccttaaatgcaggaatggcaataggccagcttttcttatccattcaaaaaaaaaaaaagaaaaagaaacaaaagaacacgtcacatgagattgaaatttacactttttgaaaatgtaagctgcaaatggtagttctggctacaaaattggctcagcggtgtctcctgatgttctggcaactttaaataagggggacctgcattatcaacctgcatcctgcacagacagtagctacgttaaccttaagaaatcaaatgccacaaagctctgataggaaggggggaatagaattgggttgtaaaacctagtctgccatggcttcattcattccagactcaatcctgacttacagcacagagttattttctcccttggtacttttctttatgctgtactcagtatgcaaacgcttttccctagtcaatgatccatctctaatcactgggattgaagagcaatgtctttatttagaacaagtcaactatatgctaccaagaagttaaagcccatggtcttcaactggtttgtgaaatatttttgtgcccattaagtgattccatatctgagtattctaaatagccctggatggctagcacaatcatgaaggatattacagattcagcttctttttgttgatgattcttttaatgtgtccttattgacttaagaaatctatgaatcaatcttaaaaggcagagttttctatcattaaattatgatgtgatactcaacaaaattcagtcaaacgtggcaatggtgtacaacggtttcttaagatattcatctaaatagagcccgatgctatgacattttaaataaaaaatttcattgaaacagaaaatttatcatttctatttttaaatattttgctggcagaaatcagaataaattttgaaagagttcaatttttttgttcatctaatatttcttaatgataattcttgttctttagattatccacacatgcagggaaatactattcaatgttttctatgaggaatatgcttcacagtcccaaatatgatatggttcatcctccaaattgcaaattgttcatataataaaaaatatgaatttgatggagaatttttaaaaataaaaagacatacagaagttccatattcttaccacttgaatgtagtattagctcatttttttttctaatctgaccagtttgttagctattatttatggttcagaaggagttgccctgtacctatctggaaaaaacaaaaacaaaacaaaataaacagcagcaacaacagcaacaaaaaaaacccacaatgattctcctgtggtttttttcagttcttactcaaccaaataatgtatttgactcttatggaaatttcaatatagaaaacaattgacaaagcctttgaacctaatttttagatgctaatgtgcattgtcaagttaaattcaataaattggggttttataaattttgaaataacataaaaattaacagaatgcagcaggaactttttaaatgctttccttgctttcaattgtattagagggaaacccttcacattttgtaatattctttaataaaatacaataatgttttccataagaaaatcactttgctttcttactccccacttagccaatgttacataacactagtggagtctaagattgagaattttatgactgtgtcttgtattgtaacattcattggatcgattctccagggactcttaaggatgatatgcgagactataggtcattgctatgtgatatggctaaaaagttgtcttggttccttagtgatgtcatacttatacagataaatacacctggataaatacacatgtacaaacacattcaccctttcacattttttttttttgcaaagaagcaaataagtgtgttatttaagacatctaaatcttaatggcaatatataatatagtcaagcaaacgctataggggaagtctgccttcaacctgcttaaaccccttaaatccctatacccccttaggagatatacttattctacaaagcctcagatttctcaactattacaaagagaaataatgtctactttaagagagttggtgtaaaaaattaaatataacttacacaaatttctggcgcattgcaagagttttattaagaataacagtttatggccaggcatggtggctcacacctgtaatcccagcatgttgggaggtcaaagtgggtggatcacaaggtcaggagttcgagaccagcctggccaatatgatgaaaccccatctctactaaaaatacaaaagttagctggatgtggtggcgggcgcctgcagtctcagctactccggaggctgaggcaggaaaatagcttgaacctgggaagtggggattccagtgacccgagattgtgccactgcactccagccttggagacagagtgagactccatttaaaaacaaacaaaagaattacaatgtattaaagtgtttgtatgttttattgcacatttgctctcaaatattttttctgtgtcaagagaggttcccaggccaaagccaagccaacttttacctttcccaagtgccttttccacatattccttttacagcaaggtagataaacaaaaaagtaaaatgaaaaagaaagaccaggtcagagcaaaatagtacaattgccaaattcaatgtatagtaaaaactgaagtgtttatccaaatatttaaggaaatgttacaaaacatatttattttgaattaaccaaatatttgaggattataatataattatctggaattgcccttaattcttcaacttttcaagtctcattttatttggaatgctttaaaatcattctatgtacaataatatgaactatatagataggcataataaaacaaattacattgtcataaaatattaaaatgatgaattgatatttttctggcctagtttcatcatttttgtatgtagctattaaactaaaaacgaaagagcaagtgttatagttctaaagaatcccatagcttttctctgatgaaaataaaacatgttgtgacctcatagttattaaaaattaacactttctttttcacatttattttcataattgataaggtataatcaccctaacaaataaaggttttctaattgataatatttctgcctaaggatttcatgtttgatcacctccttgggaggcaagagcttgtaccttaagaataaagttgaaattatcacatatttagtaaattgtgaaaggtcaaatatctatgagtgatgctgatgagtttgtagtgattagttaactgaatttaagctaatgattaaaagatattaaaaatttctgaactcttttctactttcttgccaactacatcttcctctgaccacttattttacttatttatctattgaaatcttcctgaccccggtacagctagggattgcattttatttcagagtctttctcttcaaataattcatcttttgctcttttctgcatagcttcattaacacaatcaatatttttttgtgattgtgccttagggatagagtccctaggatgcatgtatttcttaatgttagcatgatgccatttttacataactgatagcaacatagctcataaaaattttgcgtgtgtgtgcgtgcatgcctgtacacacatgtatgcatgcgtgtgtgtgtgtgtgtgtgtgtgtgtgtgtgtgtgtgtgacagagaagagagagagtcaagatatgtggtgtagctttttgacagaggccagaagtctaccacctaagtcaaggacttataaaaacagactgcgtgcatttcttctcttttgcaatcacataaaaattattttaaagcagtcctagaattggtctatggatatgtacagccataggcacagtcacagtgtgagcagatccacatattctggaaatcacaaatagctgccttggtcaagagctcaaattctaagctttaacagcagggggaagaaaacatgaggtgtgctttgatcctgctgacaaaatgaggtattcatacaagatgctactgtcaaaatagtttacttcacagcaaaaagagattctttgaagaaatatgctcaaagcgaagcatgtacttattttatttgcaaacaaaaataaatctttttatactcacaggtggaaaatcgaactctagaagctcctcctgaaggaacagtaaatgtgtttgtcaaaacacagggatcccggaaagcccacgtgaggtgggaagcaccttttcgccctaatggactcttaacacactcagtccttttcactgggatattctatgtagacccaggtaatttgtttttattttctaaactttaaataacattagaaaacaactcatttttatttaaaatctttcttttggctaaaatctttcttttagccacagatgttggtttctttattttcctgaaaataacctatacggataagctactgcccgacggttctcagaatgtggttcccagagcagcagcaacagccacatctgatgaacgcttagaaatgtacgttgtagagcttctgccccagcctagtgaatcagaaactctagaggctaaggtctaacagtctgtgtttaagcaaaccctttaggtgacacatgctgaagaactagtatatactcttcttcccttgctaaaaagtggttcaaacctaaaacatcgtgtatgcaaagagttgaactataattttgcagtccatcttaaacaagccatttttgtgactgttttagatttctgaactatcttagtaattctgctgtgtgttctgataaatttactgaatgtggattaggctacatggggttccttgaaagtattttcaaaaactatctgattcaataagttaggtgctatggtagcatgatgtttattttaagcaaactctaccataaaaagagcaggtatatattttaatagaaactttggatctgtattaagtgctgttgtttatcatcttccaggagtggccttactatttttgtaggaggaagtttgaacctttatttttaaatgagtagcaaatatgcaatatcgtggattcagtcagacatgttattagcatgttagtctgttgcttaggcttgaaaacgtttctttgtttctgaattttctatgagtctttgtaatacttaataacatcctccaagtgtaaaaacaggtgaagaaagaaaaaaacaggcttttctaaatttgaaaagggtggttatttgtgtactgcactggcaagcaaatgcgagtcaagtgcgtgtcagagtctaagctgatcccctcaaagattggtgtgtcccttttttatgcaatcagggctttcatgtattctgctgtaaagcacttgtaagattatgaggtgaaggagtgatgatcgatttgaaaaaagaagcaacatttaggccggacccatgacagcccagctatttccgccaaggcagctgggtgaataatgcaagagccatattccccctcgtgtttaatcttgcattgtttttgcagagaaaatttctgcttgccttctaagtcatgtcatcttcagttgtcatcccgtctctcaaaccatcaaaacggtattaaatgttgcaaagctgcgcggcaagagaactttcaaaagtcagaacccatttaccgaacagcccttgtagaaaatgtattctgttctcggcagaattttccttcagttctttccactgagaagtttactgatttctcccagtggaatctgctggaatttatcggttcatggttggcagtcacagattaaggtaaatgtcgatccgtaatgaccctctacatgttagtattgcagtaaagctgggcttttatgtcaaagatatcggagagggagctattacacatgacaggggtgatcaagggactccagaccaaggcaagcattattaaatattgactagttctgtgatttatgtagagctggaggaaaaaagtgactttttaaccattatatattcttcagcaacgaaaaccagccatttatctcctgctggtaataaagaacagagtgcctgcatattttagtggagggaaaacctggtcttataaatgagatgaactccttcgtgataacatttcagtttgttaattgccaaaagcaaaacagacaaattggaagcaattacgagatttgacttaaagaatttttgcggtacgggttcaactcaggggttggaaaggggtgaggttggaagcaaaaggagcatctgagatgggccccaggaaaattcgtgtcattggttcactggcactggaactctcatgtccactgttaactgaaaggattttgaatattgtcttgtcctgtcacccatcagcagctgggtgacatttacactgagggtagggaggtctgcatggctctacaagaacaaattaaacattaattcatcaaacttatttaagatatcatctgttcactagatttatacaaagcttattgaattgtctaatggctaattggttatttccttgacataatgaacaactgtatttcatcctttcctgtgatggctgctaaagagggggtggttagaatttataagatagggaaattcagctagttcaaagcaagtgtagtttcaacataaaagtgcctgcagctgggtcactattttgcaggagaaattgggctgtgtctgtaagacaccctcatgggaaccctattcttcatgtcaactcgtatcctgaactaaaaactttacaaaaacattaggtttcgtaacaacaagtgaagtggcacgtatcaaagtgtgatttttcttaaaaattgttcacttttgaccacgtattatgttctcatgaatcaaaatttaaaagatagaaaaaaaggaagtaaagtaccaagcctgttctgcagtctcagaggaaaagtagtgtgctcagcttcttatatccttctagaaatatttgtcttataggtgtgtgtgtgtgtgtgtatacataaacaaacacatatttcccccatttgtaaatacatatagttttcatctcacacatgcaacattttatactaatgataccaagtggtacacattattttgcaccatgctttttttccatcttaataatttcagagaaattatcacagcaattcctaacgagcttcctcattctttatatagcttggtaatattcaacgggttagagcataccatcattggtttaaccagttccttattaatggccatttaatttgtttctaatcttttattatttcaaataatgcctcaatgaataaacatatgggaatgtcctttcacactttgcaagtaaattaatacgataaattccttgaaatgaattgccaggtcaaggaaaaatgaatttgtaactttgtaagatactgtcaaatttcattccatagagaccatataatttatattctcagaaaaagtatgagggtgcctgtctccccacagtcttgtcatcagagtgttgtcagacttatctttgccaattcgatatgttaaaaatggtagctatttcacagtatcttgagtagttattaggaattagttggaacttatgaacatattttcttaagtttaaaaactgtgtttcttttttttgtgaatgcttcatttgtatcttttgcccacatttttacagaggtttaagaagttctttatatattaggaaaatctgttatattagtagaaatttttcccttcattattgctttttcctagcactctactgctttcttttataaaatatttatattcagttcatctgaaatttatactgatataatatgtcatgtatgggtcaaaccttattttcttcccagaaaattttcctttctctcaaaaccatttactgaataatccttattgttccccactggcttgggttgtcatctccaagagctcctaaatttccatctttattaataaatacgtgtggacatatctgtacctttatttacattatcaaggtatcttaatgattaaaactgtagaatatattttattgccttgtagatctagtcctcttcattatttttattttatataatttcctacttattatttcatatttatttttttcaaacaatatttatatatttctaattttaccccagaagtcctgatgctgtttttataaggatggaacagaatttacaggtgacttaggtagaattaatatctttatactgtcgggtttttctgatcaatgatatcattatactttctattttgtgtcttttgtgtctctcgcaagagctcaaagttttcttcatatagatcttgcatatttctgttgtgtattcattaatattttataattatacatgatttaagtaattatgataatatatacattttacatattaacattaaaattaaataactgaaaagagctactttcaataattatatgtagacttcactcgcagatacctgtcttctgaaagccacgattttaaatgtttatatctattagatgatcgttcatctaacttttacaaatatttgaagtttttttgctgctaagattattgtcattttctctaaaatgcaggcatcttaccaggggaaaatgataatctaattaattagactctcaactagtttgtggtgtgtaaaatggcaacaaaggttggacctgaagaatctctgtcctgacagaatttacaaataaaaaagctaaggcagacaaacttagccaagttattctcaagtgcatgaggcaggaaagaaactagatggtgtgacaagtggaacagaaataattaagggaagattttggtaatactgggtctttctctttaattatggatgagaataaactgaatatggaaaaactaaagagaatgacggagagagcacaaacacatgtgaatggcaaaaattaacagatcaaccaacctacacttggttatattagaatgtatttttgccatttgctaacatccaccataaaagtaaggattagcacttttctatgggattctacctgatttgaaacatctattcaattatgaggaacatatgatcaacaaattagtttttctagggtgtgcaagtgccatttactgacctggaataagtgctttgctcaatgactctcaagggtgcaccattcaccttgcacaggtgaatagtcaactcccagtgatcactttacaacatcttcagtattttttcacacatatgaattaactatcaatttaaattatagataacaggtttataatcattccttgtgaaacatattgaatatataatttttaaaaaataaaacaaatgtgtaagtttgggaatacaaataaaactttacagcatagtagtagcaacctggcttatgtaaaactatttataaaattataaattctattccatttaactggtagatgaaagtattgtgccatgataatttagggttacatcattattttacagagcttcaaaagtattctcagctacaaatataaaacaacctaattgtcaagaagaaaaataaaaactatgaaaagataaagaaaatattctgagatcctatagaataatttttacaaatggcagcttctttactactagacttcccttggattcttcacactgatcctgtacttagtagacaatgccatgtcttagtacacatatcctgcttttttcttaagtggttattgtggagtcctctgcgaattgtttaattcttcattatccttccttttgaatgaattgggacgtgatcttcattgcttgatatcctgacagattgctttgtgtcagagtttctaaggcaaggcaccagcgtgtgctaattgctgagtcctttgtgcactgttaactctcacctgctctgaaaaactggattgcagcttagttttcatcttcaaatgtctctttctcctaatcccctattttgtgctgtgccacagaataaagatatttatttgaaaaagagagatatggattactgtgggggaaaaaagagggtaaatgaaaatgatccttaagcattagcaaagggaaatggcattttagaaaaacaaaagaaaagcaaagcagaatgatcagtttttaatgttgaaactgaatcatttcatggatctcagataactctttctgaatgtggagaggtacaacaaacaggttttaggtgacttttcccagagtaaatatgtctaatccaaaataagtcctcaaaagtaagggtggaaggtaaggaccgggaaagaaaggaaatggaagatagaaagaacaatttttaaattgttaaatgctcatgaaatgagcataatcagatgctttttatttgcttataagacctgatggtcctgaaaaaaagaaacccaattagtatttaagaatgtttttaaaaaggcaaatgaaaatttgggaaatatatctgttatctctaggtggttatattatgaatggtttgtcttcccatttttccttttatatgtactcaacttaaaaaaaattctataatatatacatattatttttgcaaaacattataaaaaatagctcacaagagcagatgattcaagagcagagtaatttggagtaagcatggtgcttctggctccaaggaggagatccgggtggtgagtcagaagtcctaaggtggaagcttacagaaagaagggcatcttcacatatttccaatgattattcaggaaaagtcttttggtgacttgtgggatgttaaatttaactttcttcttatgttttggctgcatatgtttttccaacagttgctaggggtaatcaaacaaaaacaccaaggattctgcaaaacagaaaagaaaactaaataggagtggtcagagaaataaaagagcctctttatacctgagacataatggtagtgttaggggaggactgaggcatgggagatttggtttttttgaggttacattgtggggatcaggaggggcataaagtttttactgcagtggtaacatctggaaggagtggggtgccttaaagaccgattaggatatttccaggtagaaaagatagagtataaatgtgatggctccccatcccccattctctgagcctaaactttttcttctgttataattggagtccatatctcatttcaatattggtatcaagtgtttgctctttgggataaatccccatctaaaaacaaaagaaattaaaggggaacggaaactgcagaaatgcagaaagtatttcattgctggtttaaactagatgaaagtgtatttttaactacagttccgaaaaatcctagcacccagaataggcttaccttctcctggaattgccagttaccagaaagagtgctttagaatgtcagtatattcaaatgctctaaatctctaaaaaatcttgaaaaaccaaagaaatgcagttgatttttcaaggttacccagagaaatccagtgtccttttcacacactctggttctctgggtgcttttctccccagaatatactgtgttttataaaaattacaagatggaaaaaaaatatacagaagcgtttattttcttgagaaggtaaggaaaataattatatgtgggaacctcttagacttccaaagagtctgtaggaaggctaatgctgttaggaaagggacagctttgttttatagtccctggtatctgttttttagtgtggagggaaatctgcggtttcagagctgtgcttgcaacccatgcagtatatctgacacgctgccctctgggaaaacccgccagtgggggaattgttccagtgatgcagtacagcttgtaacttggaatcccgtcggagaactttgtagttgcttgtcagtcagtgggaagataaaagaggcagcttcttttcaagcaatctgaattcattttcccgtaatgagttagggggtcaggcagcaggagtgagttcacctgagatcttataaagtatatttcctggtggaagaaagagaggaggagaaaagggaacataacgtccaccacgcagctgtagaacggcgtaatgtggcttgtcgttggtctatttctttttatgcccacatattctgatttcagagcatatatttttagaaagaaaggtcaaagaaagtacagctttatctcatttaaaaatataaaacccaatctgtgaaaattgaaacccagttaaagtctaaagcagcaagtgatagtgtttcatacacaaatactcatcaagcaacaacatgttaaagatattgtactatgtcttctgacattacatcattattaaccacacaatttattttagagacttagaagaaattaaatgagtgtcatgataaggagttcttttagttacagacaacagccccagacctctcttcctgaccatttcagatgttgtttctaaatcagcacaaaagatattaggaataaaaactgtgggagaatgttcttatggtcaaagcaagtattaatataaaaaacattgggaatgtaggggaaatagagaaaattactctgtttctatttgtttggaagcaaatgtctcttatgcaaaaaagaaagtatagttattatatctttctgtaagtttccaacacatttctggatgtataaatacatacaaatctaaacacttgggaaatcaaaaggcattttttctggactacaaattatggccatattgttaatgaaaatataaacgggcaataataagatatctgtcatttcaaatattgggctatagaatgtatatgcactgaatgtattgacacttctgattgtatatcatgtcatggccaataaagctatagaaatgtttaattaggacatattcttccacaagaatggagttaagcattaatttatcaaacttgtttaagacctcatctgttctcaacactcacacagcagcttattgaatttgtctgatatctaattggctattttcttgacataatgaacaagtgcatactctatgctgttgtgtctgttgaggcggcgatgtaatgatgaaatggaaattgtaaccatgggtcgtacactgattcaggatatgcagcccacagagccatgagagggcacaggatttcattgtcctcatggcttaactttatgtttcaaactctgcagagcatctctgtggaggaatctctccattctaactcctcatgaaaggagcctgttagaagcaaaatacaatcagcagatcacccagatgatgtacctttggctttggaaggctttgcataatttaaaaaataaaataaaattctcctatttagagaaatttttaaagcatttaaaaatactcacaccattttcaaacccacaccacaagtgatttgggggatttctaatacatgcatgataaagttcaactggataagccagccgtggggcagatatataatgtttacctatagttgtgtaccactgatatgcctgtctagtgttggtttttgcatgctttgttgtggcaagagttcagtgcttgttgaataaatagtaatattagaatcagtgtttagattttggtagactgaacatatagccattttacctaggaggttctcagtaggaaagtgtcagctgtgaattgatgttagagggaaacagaagaatggattacacagagaaatagaaaaaaaatctagccatctggggccaatgtccttctctagcctctaagacacaccctacagcaaggaattcccttctctgattcctgaacttctcctgtgggaatctagggatcaacttccttggatggtgatgggtccttatcattatacagagttatgaggattacaaaccatatgtttggccccttagaaagtgataataggtgactcctaaatcatagttctatataccaagaacagcccacatcaaacatatttcccaaatttttgtgtgaaattcttcataatcaatgtgttactttactcaattattagtgttgcagaatctaaggattctagtgggctatttatgaaaaaaaaagtatatggcttttagagaatttggattctttatttataaatcgggttgcaaataaaatttatgtttttccttctagcaatatgcctttggggagaagcaaagggagttttacacccaagaagcagaaatcaaaaatcatagaattaaattaagaaatttatttgtttatttggacattcattcatttgttcatgtagaaagcatgtatctagcttgttttatggaacaagacagaaactaaatgatagctgctggagttgagtagagaaattttctctatccagagttgaatcatatgttgttttattgtgctaaatttgttagacatttaaatttatacgaatgatggtgcctgtttctgggatatttattccttcccattgtaaacctatttctccaaatcatcactatgctaacttaatcactatgctttcaacatctgaaacatttagaaagtacttaaatatctggcaagcatggtctgtgtgctgaaggggcttgtggtttaacaaggggagctagaaattacccaagtaatcatatagaaatataaaattacagactttaataattattaaagtaaaagtatatataactaagattttcataataagaagcttaatataaattggagggtcaagaaagtttctttgagctgatgacatttagggtaactgtaacatgactagacaccaactcagaaactagaaagaggattccaaagtgaatggcatttgtaaaggatgtgaggaaggtaaaattgtggtggatttgaggaaatgaaagaaggacattgtagctaggctagggagtgaagaaaagaatggcacagatgagactagaaagttagacaggagctacttcatgcagcagactgttttaaggactttggcataaagtaaaagtgtagttgcaataattacaaaaaattttcaaattttcaattgtttttttttattattattatacttcaagttttagggtacatgtgcacaatgtgcaggttagttacatatgtatacatgtgccatgttggtgtgctgcacccattagctcgtcatttaacactgggtatatctcctaatgctatccctcccccctccccccaccccacaacaggccccagtgtgtgatgttccccttcctgtgtccatgtgttctcattgttcaattcccacctatgagtgagaacatacggtgtttggttttttgtccttgcgatagtttgctgagaatgatggtttccagcttcatctatgtccctacaaagtacatgaactcatcattttttatggctgcatagtattccatggtgtatttgtgccacactttcttaatccagtctatcattgttggacatttgggttggttccaagtctttgctattgtgaatagtgccacaataaacatacgtgtgcatgtgtctttatagcagcatgatttataatcccttgggtatatacccagtaatgggatggctgggtcaaatggtatttctagttctagatccctgaggaatcgccacactgatttccacaatggttgaactagtttacagtcccaccaacagtgtaaaagtgttcctatttctccacatcctctccagcacctgttgtttcctgactttttaatgattgccatcctaactggtgtcagatggtatctcattgtggttttgatttgcatttctctcatggccagtgatgatgagcattttttcatgtgtcctttggctgcataaatgtcttcttttgagaagtgtctgttcatatcctttgcccactttttgatggggttgtttgtttttttcttgtaaatttgttggagttcattgtagattctggatattagccctttgtcagatgagtagattgcaaaaaatttctcccattctgtaggttgcctgttcactctgatggtagtttcttttgctgtgcagaagctctttagtttaattagatcccatttgtcaattatggcttttgttgccattgcttttggtgttttagacatgaagtccttgcccatgcctatgtcctgaatggtattgcctaggttttcttctagggtttttatggttttaggtctaacatttaagtctttaatccatcttgaattgatttttgtataaggtgtaaggaagggatccagtttcagcttctacatatggctagccagttttcccagcaccatttattaaatagggaatcctttccccatttcttgtttttgtcaggtttgccaaagatcagatagttgtagatatgcagcattatttctgagggctctgttccattctattggtctatgtctgttttggtaccagtaccatgctgttttggttactgtagccttgtagtctagtttgaagtcaggtagcgtgatgcctccagctttgttcttttggcttaggattgacttggcaatgcgggctctttttttggttccatatgaactttaaagtagttttttccaattctgtgaagaaagtcgttggtagcttgatggggatggcattgaatctataaattaccttgggcagtatggccattttcacaatattgattcttcctacccatgagcatgcaatgttcttccatttgtttgtatcctcttttatttcattgagcagtggtttgtagttctccttgaagaggtccttcacgtcccttgtaagttggattcctaggtattttattctctttgaagcaattgtgaatgggatttcactcatgatttggctctctgtttgtctgttattggtgtataagaatgcttgtgatttttgcaaagatactcctcgagaagagcaactccaagacacataattgtcagattcaccaaagttgaaatgaaggaaaaaatgttaagggcagccatagagaaaggtcgggttacccacaaagggaagcccatcagactaacagctgatctgtcggcagaaactctgcaagccagaacagagtgggggccaatattcaacattcttaaagaaaagaatttttaacccagaatttcatatccagccaaactaagcttcataagtgaaggagaaaaaaaatactttacagacaagcaaatgctgagagattttgtcaccaccacacctgccctaaaagagctcctgaaggaagcattcaacatggaaaggaacaaccagtaccagccactgcaaaaccatgccaaattgtaaagaccatcgaggctaggaagaaactgcatcaactaacgagcaaaataaccagctaacatcataatgacaggatcacattcacacatagcaatattaagcttaaatgtaaatgggctaaatgctccagttaaaagacacagactggcaaattggataaagattcagacccatcagtgtcctgtattcaggaaacccatctcacgtgcagagacacacataggctcaaaataaagggatggaggaagatctaccaagcaaatggaaaactaaaaaagtcaggggttgcaatcctagtctctgataaaacagactttaaaccaggccgggcgcggtggctcacgcctgtaatcccagcactttgggaggccgaggcgggtggatcatgaggtcaggagatcgagaccatcctggctaacaaggtgaaaccccgtctctactaaaaagacaaaaaattagccgggcgcggtggcgggcgcctgtagtcccagctactcgggaggctgaggcaggagaatggcgtgaacccgggaagcggagcttgcagtgagccgagattgcgccactgcagtccgcagtccagcctgggcgacagagcaagactccgtctcaaaaaataaaaaaaataaaaaataaaaaaaataaaccaacaaagatcaaaagagacaaagaaggccattacagaatggtaaatggatcaattcaacaagaagagctaactatcctacatatatatgcacccaatacaggagcacccagattaataaagcaagtccttagagacctacaaagagacttagactcccacacaataataatgggagactttaacaccccactgtcaacattagacagatcaacgagacagaaagttaacaaggatatccaggaattgaactcagctctgcaccaagcagacctaatagacatctacagaactctccactccaaatcaacagaatatacatcctcttcagcaccacaccacacctattccaaaattgaccacatagttggaagtaaagtactcctcagcaaatgtaaaagaatagaaattataacaaactgtctctcagaccacagtgcaatcaaactagaactcaggattaagaaactcactcaaaaccgctcaactacatggaaactgagcaacctgctcctgaatgactgctgggtacataacgaaatgaaggcagaaataaaaatgttctttgaaaccaatgagaacaaagacacaacataccagaatctctgggacacattcaaagcagtgtgtaaagggaaatttatagcactaaatgcccacaagagaaagcaggaaagatctaaaattgacaccctaacatcacaattaaaagaactagagaagcaagagcaaacacattcaaaagctagcagaaggcaagaaataactaagatcagagtagaaccggaagacatagagacacaaaaaacccttcaaaaaaatcaatgaatccaggagctggtgtcttgaaaagatcaacaaaattgatagatcactagcaagactaataaagaagaaaagagagaagaatcaaatagacgcaataaattttcaattgttacacagttgaatattagttacatttagtagctaaaggcttagattggagtgtcttttttcttcagagacagttttgttaaaatggtaccagttagaccaggtgcaggggctcatgcctgtacccagcagtttgggaggctgaggcgggtggatcacaaggtcaggagttcaagaccagcctgtccaagatggtgaaaccccatttctactaaaaatacaaaaaaaaatattagccggacatggtggtaggagcctgtaatcccagctactcgagaggctgaggcagagaattgattgaacccaggatttggagattgtagtgagccaagatcacgccattgcaccccagcctgggtgacagagcgagactctgtctcagaaaaaaaaaaaaaaaaaaggtagcaattataaatgtgttattggcttgcagtcattttttctatggagatatacatatgtgtattcatgtgtttgcatatataatgtattgagatcttactacaaacacatatcatattttacacatttaacattatatcatgaatgtttcttgtattacacacaaaaaactcataacaagtatttaatattcaataggtacttaatatactatagtatagatgtgccaacatgtatttatcaattccttattgttggatatttaggttttttattcttactatttgaaagaatatttattgttaacacatacttctacatttttccttaatatgtataacaacaaaggaattgctaaattaaaggttgagtatatttttgaagacacttgatatgcatggcaaaatgctttcaaaaaaattacatcatttcacatggcttctaatagtatacaaatgtgttcatctgtctgtagttatatgcatttgatagataaaaatggtaggttgctctaatttgcatttcttttattcctattgagaccaaacattttccatatgttcttttcctatttgtttgtctttctttttttgtctgctcacacactttgcccagaatattttagaggttttaaaatttgttttggtatttatggaagctaaaataatatagatagtaattcttagtcattacaattttaaatattttatctgatttatctttttggtctttttatgaggtttatgatgtagtacttcagatttttgataattaaatctttgctaatttatttttataaaaaatattttctccgtctacagttgaaacatatgttgctttattttgctaaatttatcagacttaaatttgtatacatgatgctgcctgtttctgagctatttatttcttctccttttacctgtttctaatctgattgaattgtggtgctttcaacatcttaattatttagaaaatacatttgtatcttatgggtaaagtcattattttctcccttcaggttattattcatttctgttaaaaggtcttagttcttttcatatgcatattcttccagttgaacattagattgagttgaaaaaatgacagcaatatttttaatggagtctccttcttatacattaattcttctgaaacttacatcttaaaatatttctcatctagaaatgtgttatttttccatttacttaagcagcttgtatctccattaaagttttgttattttccccataaggacctcacattttttgttagggttattccaggtatttttacttttgtgatggtgttcatttatttttattataatatttaaaaaatctctggtattacgtcagtgtttttaaaacatgccatttttattcaatactttaaaaatatttataaatctctgagttggcaatttctccagctctaggaagacagaaaatacacagatctgtacactcaaagaacgtgagtccagcccactcagtcatatgaacttagctggatataacacgttaacagacaggatagacatttttaccttgaacagaaagagctgtaattcaagttctgtgtcacagatacaatccgtacattatggtttctttaaataagccataaccaattttttttagtaattatttgcttccagttattcatgtgagattattaaaataagcttatgaagtaaatataagatgtttcaaatattcctatccattgagaaccccagaaattatccttattgaaatttttagaaaaaaattagataggtgcacaggaaaatccttataaaattatgtccctgacagagtttatatgtataataaaaatcaagagggtgggtgtttctaaatattcaactatatggattgaaggcattgtggtaaatccattacaaagattatactgtatatttgttgatgagaaaatatatattcttacagctataaaacaatgagcatcataaaattctatgattgcaatatatgacagtagatcatatatgtatagatgtatgtccatatatacgtgtgtgtgtgtgtgtgtgtgtatatatatatatatatatctgaacaaatatgaaggacacacaccaaaatataccaaaatattaataacaatgattatcttcacattttaggtaatttcagcttttctctttatggttgctgatatagccttaacatttataataaaaaaaaattcttttgtagttagacaaagaagaaatatgtgaagccaaaataggaaaacatgggggaaggaaggactttatatcatgtttcatctcatagcaaaactattggaagcatttcagaaacaaaagaccttaaaacttcaaactctaataagaaattgggaacaaaaatcttgagattgttatacaagagatgttaaagaccttaggcctcagtttctttcagaagcccagcaattgcaattattatttattatcactttacttttgcttgaatctctttagctaaaggtggtttacttccacttttccctaataatttatgtcttcatgataatagattttcttattatctttctgatttgtacctgtttcctatttaatgatttactctgtatggcatacatgccaaagttatcatgctagaaaaattattatgctataataattatgataccatcaaactgaattaaattatgtttcattgtaaatagtaaaatgtattaatttttttaaaagcttttttatgccagcggagataaataaagttacctttatgtactttcattaaacacaatgacagtacaagccaaactgataacaaatcaacgcactccttcttgtaacactcctaagttgttctgaaatcagctttcttaggactatgaattcaatgcaatgtattaaacagaatctgtgccttctgtgaataaaagtttcacctccatctcttgtgagtatatgtaggcagatctttgaacaatgaggttttcttccattgatttaaaatgaaaatgaacctggattttaaatgtgcattctaattgtccctttagcacatcagaacagcactgcctaatagaaatataatgtgagctacatatataattttgaattttctaaaatgcacattttaaaaaagtaaaatgaaacagttaaaactaatttagtagggcttggtgcggtggcttacacctgtgatcccagcattttgggaggctgagggtggcagaccacctgaagtcaggagtttgagaccagtctgggtgacatggcgaaaccctgtctctactaaaaatacaaaaattagccaggagtggtggtgcatgcctgtagtctctcagctactcaggaggctggggtgggagaatcacttgaacgtgagaggcggagtttgcagtgagccaagatcacaccactgcactccagtctgggcgacagagtgacttagtctcagttaaaaaaaaaaaaaaagtaatataccttatttaatacaatctatctaaaatatcattattttaacatgtaattaaaacctaaaagttaatgagataatacattattttttctaccaaatctatgtctgtattttacacttataggatatttcaatttagattttttatcagatatattcagtctgcatttagatgtcataagttttcagttgagaaagtagatccacataccaaattgtttcaaatgtatttaaaagttttccagtaactgaatcaatgatcaatttttaatttaaattcattaaaatcaaattagaaattcagctcctcagccatactacccacatttcaagtgctcaatagccatatgtggataggggctattgtattggacagcaaaggtttagaacacatgtataagatgttaacacagaggaaaagttaaaagttaaatcaatgccaaactattgggaatgttttgtctaccgggtttcaagaaataatgacatgactgatatttttcttattgaatcagctgctcggctggttggctcaactaatagagtcaaacagttgctgggttttataaacaaatcatctccttttttatttggtcctccaattttcttaaggcaaatatttgtgccaaattatgccaaagtctgtctctcctgaatatccctgttatcctcgaatattgttgagtgtcccatgaatataactgttaaatgctgttttgagttaaaaccaagaacacctatattgagaaaaaaattaaatgtagttaatgttgtaccaccatgttttgttctagcttctcaactgtctcatgtaaataagcacaataaacatctactgagtgattctgtaatagtttggatctataggtccatcatttgtgatgacacatagaagttggcccaggaaagctaaaagtatgtcatatgtcaaataatgccttccaccaagtttagagcagcatttcttccccagcattacaacttcatgtaatggcacttggcagtattggcatttctgatatgacttcttttggctagttcagaattcttaaaaaataaatagtttttcaccctgtgattgaaagggttaaatagtaccaattcattacactcacaaaaggatttattttgttctcataaatcagttttattccacatttttattattcccttgggtgagctactccaattgaaatcaatacaagtgcaagtgagacaatcaatctcgatatttgattatggattggagattcccaggtccgctttttagccagtttctttctgatcatctcccccaaagaactgaatatttttattgacatctatgagttctgaacatgtttagaaagaagataataatcttcatttgtatactgacaatggaagccccacaaatgaacaaggattaaaaaataaagacttaaaatatgtagctataacatcatcagcaaacttcaaatttctcaatatttttcttaagatgtagtcatgttttaaaataactttattctttcttttaaaaaaagacctgttaatacaactggtggctacaaaccacattcttagggtgctattaggtaaatgattatttttcatgacaaagatattatttattttcacatgcttgtttcagagctgaaccatatcaactggtctaggttaacaataagaaaacagttaaggtgaataaaatgcctttgaaggtatccagcctaggtcttttcatttctataattgtccaggctggaaagccaccatctgggggatttaaaagagaaaaacagctcaactttaaattagagagcaaaattgattaagttgttcctcaatgaggccaacatttatatatcaaactctctttgctttacaaacaaatttatatcttatgatcctttacatatcgaatgcttattttgggactcatggtaccatattattgttctcttgcctctgactctagccacctgttctaggttcttaagcaaaatttttgaaaaggcacaattaaacctttccgtaattcattatttgatacttagaataaggcaattatttgatgcacttatctaatcatattcttaaaataaatttcaaggtaatattaacactgcatttgttactttcagcaaacattttagccttatttagccatttactaattttcactagaatccattggaaggggatgtttcatgttttggacaaattacctaccactgattttttttcaggaagacatataactttgaatgttgtaaaaaagtattttagaaggagttaaaatagtaaacccatatttctttcatttaagcaacattaattactcttcagttactcttattaagcctttagaatagcagctgtataagccatataagccaggcacttggatttccactggcaaacttcctaggcatgtggaattaggggactgtctagaacttatttttgtccagcttcatttccttttcagtaatttgcatttattaatgctgaataatgaaagataatcaaaacattaatgaaggtatggtgcagtgatgtaacaaagggctatatcaacaaaatattctttccacgtgctttgttccactctttaaaaaaaatatttactcaagagaatcattctagaaactggaaattgctccctttattcaggaaggcagtatattttttaaaagttagcttctttaattgtttaattcagaggttggcaaatcttttctataaagggatagaaagtaaacactttagactttgcaggcaatatagtctctgccataattactcaattctgcagttatatcatgaaaattcctagaaagataattacttttgttctaataagcctttatttacaaaaataggcagctggccaaatttggcttgtagattgtagtttgtgggaccctgttttattataactcgtttatacattaaaatgcaatttacatactttccttggatatttcaatcttctcatgattcatttgattttgcaaaaattatgaatgctaatttaaaaatctatgtaatacagaaaaacaacatccactaaaatcccactacccataaataaccaatgttaacaaacagtaaacattattttagagctgtctcaattcatgggtgattcttggtagcaaacaacagaaacaaatttggttaattcaggcagagatgaattatattaaaggaattcaacagttcaaaaagttgtcaggaaagctggagagtcagacttgtggagaaccacaaataacatagcccagaccagcttatgccttcttaggacacccccactggcaccatcaccattcagtcgccttggaaaattatcactctacttctggattctcaacaattttagaggcatcttgaataatccttagttgactgtgagccattgtttcactggatcaagctttgtagtccccagatgaaagcaatgcaactgactggcagtcccatggtcttaccacatgaacttcaggtgtcctttcatttacaaaaaaagagaaaattaagttatgtttctaatcatttctttctacatacctattatcttctccctgattgttagagtttcttgatctttttacttatgcattaattatgattctctcaaggcttttcatcataccattgatttagattttagctctattctgttcctggctttttctaacttgtttattaaatacttactgcattttttaatttccagattgtttctctgtctctgcaatatcattttatcatattatagggaatatatatcattttttcccaaactacatggttattttgtctttttatgttacaatcctttctttagctgtatgtataatactcgatatattatttttttcttcaacttcatcttgcttatgccttgtatgggcagctctgtccagattttgcactggttctgagcttggtctacttcctttcctttctggtgctagtcagtcttctttcgacctaaattttgagcactaggtgttgctagagggtgcgaagatgcactgggcagaattctggggaatccagattttctgtctcctctgagatcctattatatagcttttgtggcagcacttgctgcatttattcacatgtatctcccacacctgggaacaccagctttttcccccaactcagcacagtgcttggcaggatggccagccctgatttctcttcctgtctctgcagactctactcagttcatttctctacatattggagaggattttttttggcttatactccttcctctgggaacaaagttaggagctgcgctatactaagaaggaatttaccatctctttcttcttttaggtttcaaaattcatgtcggtcatttttttccttttcctttatacatttgtacctggagaatcttcaactaaaattgttaatgttactgttttcatagtttgtttccattctgtcaggtattttggaaagacagttgtgtggtaccacttaatttagaagctgtgaaagttcacaatttgtccaaaatctctttctagcaaggtgattcatatatacagttcagagactaacagggagactgtaaggtggcatctgactttccccacctcctggtgttcatgtccttgtttactctccttcccttgggtgtcttcaaaacctgtgacttgctgctcaccagtagaacagaacaaaggtgatagcatgccacctccataagattgtaacctgtcttgctagaagactccctctttttgatacagcaagtggtcacactggggaggcccatatgggaagaaatgagggtgaacgccaggcaacacaaaactggtaactgagagcagccttgagtcaatagccagaaaaaattgagaccctcagtctcgacagcctacaacaaattgaaaactatcaacaaccacctgagcttgcgagagatccttcctcattggaaccttcagatgggatttcagtcctggccaacaccttgactgcagtcttttgagaccctgagcacaggacccagttagctgtgccagactcctgactcacagaaactatgagattctaaatgtatgttgctaagttcgtggtgataccatgacacatcgataggtaactaacacaggaacaccttactgtgtgactgtagcaaatgaaacaggtagaattcaacagcaaaacatgatatcattctcatccagacccccaagtcgttgctcttcttttacagaggaaccatctcaagtatatatcttccagtaattagaagaaaatgttaaacatgtcattaaacaaagaatggaccataggctttgtctgggatcaataatggttgtcaaattacttgtctgatcctagtagcaccacaggctcagcaggttcagcatggttagtaaggctctaccagaactttaaaaggaaacacgttttggtgataaaatagttgtattcatgtccagtgtttagtgtggaagccggagaccactttctatgagagtatatttgttcaataacttttagctgattgagataacagcatcagtttgttcagctggaaaaaagtttgcccaaatggcaaaaaaaataagtcaaagtggaaaaaaaccctgacatttcagagcatatatggttagtaaaaatagaccatacttctacaatttacaatagtcacagtacatctctgaatttactctctctctctttctgtgtgtttatatacatatatatagtgaactgtactgaattttatatatcgtagtgaactttatatataaaatgtataatatacatgcatatatacatatatctttcatttttataactatttttagagcagttttaggattacagcaatattaagcataaggtacagagatttttgtctatcctttatgcattatagttcctttctgatattcataaaatgagatacatttaggaaaatctgactgtggtacatagagagagcttgatggggaaaaataaaacatgcttcaacaaactttaaaaaataatttgcgatatttagaacagtaattgtgcctacacgttaaaaaagatctagagaacaaaacataaagattctcgatatctatagagttgtcattgctcttgtatgggcacaaccaggacaaatgtgtctgaagcatcttttggtgagttgataaaatagtgcatgtatttattccctgcactacaattgtcaggctagaggaatgaccaatttaaagaggagtcaaagaagtacagctttgactagatgacaactaattaaaatcactattacagtaattacagtaatgtaagaaatatgatgcattaatcgagcaccgtcctcagaaggtcttagtggttcataggctatttatttctctttcaaaatatcctgtggagaagacagcttcgtaggcatatgtccataaatattttatacattgtcaaaaacttaaggccaggaatagatttctttcaccatatattaattacaaaataaacaaatactcagcacctttcagattcctaccaacatgagatctatcagaaaaatggaatctggaagaaacacttgctttttggttaaaataatttaaaataatatttttagaaggaataaataaatgtaacttaaatattaatacagggtatatagagagacctgaaattcttggctcacagtaaaggctgattttgccagtttaccttgatcacaattcagtgtcttctgattttggtattggcagaatttcgtgatagtgagatggaactgaacaactctaaaattgagaccttaataccagaaaaatatagtatttctttgtacagcaagaagtgggaaaaattagttaataccttttctaccttaaggtgtaattggattcagaaaaagactaacttaaagcaggaccaggcctgacatataaaatcctcacgaggtaacaagaatcagtttggtttgttcactgtcatttctcattataatctttgtcatgagaatggattcatgttgtgccattttctgttcctgttacaatctttgtcacatgaataagatatcaggatgttaatgcctggcatacagtattgtgtgtgttatgatactgtacaggactacgctgacctttgcaatattatgtattctgattggttgttcatgtcacctctttcccacaagttaataaggctgtaaaaaggagagaactgaaatggccagccagtcaaattatagaatattgaaaaggtcagagcagtccagcacagagaaaaaaaaattatggaatatatggtgcattaaaattcttgtgacaatgattgtaacaagaataggaaaggatacccatttatgttattccaatctagagaaccccataggatggtattctcgagacagcaatcatttacgcatccctgagtcatacatgtgaaaatatccatttatgctgttttttccttaaaaataattgcatagattttctactattcaacaaaaaagagcattgaaaataagattttcatctcagaaaaggggcattaatattgttaacatttcagttaagactttatatttgagactaaagaaaaggtttttttataagtaaaacctgttgttcatatgagatttatttggtctattttttcatgtaacacttttctttgaaataaaataggagagtaggactgaatgaattaacctttttcaagaccctttagaatgtgggatagaccgaaagagcagttaggagtttatgtagaaattctacatgatctatgcaaaacttattttatctttatgatgtgtgatgttggccaatacacaaaaaatcttttcttcctctgcatcttcagtggaaagatagtgacagagagaaagaggtataatacttaaatcagaaaccctgatgttattgttcttaagtgtgcaataattacttatttttcaaattgtttttatgcatattttaaattttcttgtagaacaacttcattggattttgtagcctataaggagacatctgttttaaaccttagctttacacttatttcactaatagagtaaacatgttatagtccaaagctagtcaaagctagtgatcccagcaccctatgctctgatgctcatccagtaggcctggcgtagaattcagatatatgaatgtttatgaggtaaccccaagtgattttgatgtaggttgtgcctggaatattggtattggcaacctcattttgcaaagagctaagtgagacccccagttaaagcccaatggctcagaccaagccacagagggtggaggagggcaactcaacttcaaatcacagtgcttgggtgggggcgaagcaggcagtggggagttgcggttccagaactcagaagcttaaaaggtcttgcaccatccacttatactcacaaatagggtcagattggagggccaaccagacaggaatggtcgcctgcgataggacacacttatcactttcacattttcaagcttgatttttgaggctgaaccaacgaggctgcattttccagcccactgaaagcccagtttatgcagtgaaaagtggcaaagcacaaccatctcaacaagaggaacctgagcacaagcattttaaaaatctacccctccccgcccatattgaggagcccaaattcctaaagttcaaaggaagaaaggaaagacagtgagagtgaaatggaggaagagctaaaatctgtggatcctgctttggttttgaatctggaaatttttgagcttcattgagggctgaaatcctgtcagttactctaggtctgtgaattgaactgtatgtttgtaggggtgagagaacattagactcactcagctgtatagttactggagatgtacaagttcttttttgagctgagcaaaatggttatgtaattgcatacttctcataattattgagtaattatatacttcttataattactgagtaatcattgttctataactagaacttaatgttacaactaattatataattaccatgtattaatgttgttatctaggaagcttagaatgaagtgctacttatatatctccccctgccatgccattttcaaagcaagcagtagtgtttgttttttgtttgttttacagttcaaaatttccttaaaaaacaaacaaacaagcaaaatgcaatggaaaaaacttcaccaatattatactcatacatatttactcattgattttgtatttgtccctggctgaaaatttgtaaaattatattctcatggcttaattttagaatttccattgttgctttacaaatttcaatcttttataagacctgcacagttacgctacttgagagtcaattgaatatctgcttgagtctataggacaagctgacctttttgaaagtttacaattgagcatgtaatgacagcagaaatacttccaaggagctcaatatcatggggacaggaggagatctccccatgctgaccatgtaattgttcttaggcaatggttaggatggtcatatttaatcttaaccaggtttcttgagtgcaagaattatgtcttatgtacttggggcatgttctcgtcagtgcctagaaaagccttctccttgcatgcagttggagctcaataatcttcagtagaagcaagctgactagttgtaaagaacctaggaaagctaaaatggcataaattggaaatgtctttttagtgcataatgaaattatcaaaggctgctttgtaggtttcataatgtcttgctaataagtattacacatatagaggagtgcattatctacttacattttaggaccttgaaatcattctttaagctatgaatatgtctttatctgcctttactgaaagtgaatagaaattatcattgtcacgttttagcccacaagcactgtttatttcctttgaagtaaactacttatttggatgtgccaattttgggtccagagtaataaattatattatgccattagggctttcttctgctcatgaaaaaaactcctgagtattttgtaacagtagatttttcagtgacttcctccatccctaaatggttataagtatctttttaaataactttttgtatgtttttacaatttgttggacctacccatatttcatgaaaatagtcaagtaataaccagatatcagaccctcttttgcattatttgatcttcattaatttcagtttgaaatataatctgatgggacaatgacacattggtaatggatgagattagtgctgctttattcattgaaaaaccttagaattttgatgaataatacattgttaggttggaaggggtagagaataggtaggtaattgctactgagaaaatgaaatacagagtacaaaattcttaatcacttgctagttctgaatggctagaatgtatcagttgtatggattacaacaaaaacaataacatcattcctagctgttgtttatgagcaactattatgtgctggatatgataaagaaataatctcacttaattttcacaatagcactgcaatgtaaatactgtattatcattcccagttcacagatgaagaaccagacattcagaaatattaagtaaattagcaaagagcacattgctaaagaatacaagaacaagttcaaatgcaggacttttgacaaccaaatttatgttctttcctttgcactatactttgctactaaactgtgttaaaatataatgtttttgtaaatattgtaaaccttgcattttgtatactatacgatgcaagatcacttttagtatgatgccatcttttactttttaagcatttgttcaataaagattatatcagtatctggagatcttgccagtatgcttgttcttctctttgaagctcaatatcatgtgttttttaattcatttgtctatatctgcagaatttgtgtgtgaaagattgaatgtacatataataaaaagtggttttatataggaaaaaggttatttgaagtaaatattggtgctcttttagataaaaaaatctcactctgtgacccaagctggagtgcagtgacacaattatagttcactgtaatctcaaatttgtgggttcaagtgattctcccacctcagcctcctgagtagctagaactacaggctcataccaccatgaccagataatttttaattttaattttttgtttttagagatgaggacttgctatgttgcctagcctgggtggtactcttaatcattcatttttctgttttttaagagttattgtatcatttctaaaagtgacaaacattaagcagcatttaaaaaattgtctcataaatttttcaggaaagcatctaatatagaaaatgttacaattttcatctgtagcccttttcttattttaaccctaattttttactcttaacctgaaatttaacctaatggtgtaagagagagagataaaacactgttactaggcagaagtattttcctgcattttggactgatgagatttaagaatgggtttgctaaagctttggaaggacagtggtgttgggaccagggtgaggatgtattaaaagtgattcttttatatagctaggcagcttctgcattttctcataaagctaaaaatattagatcttctgatcaaagtggacatatagtacctcccatccccagttgcttttcaagatattctgactaattgaaatttaaaagggcattagatagaaagaaatccacccacatttcaagcaaagtgaacagaaaacacctcagtttgtgaaatatacaatatctgacaaatatgtctgagtataatacgtatatccagaacaattctatttgaggaataatgtgttatttcttcctgtctgcacatccaaaaaaattcagggatttttattggaaaaaaaaccctcaaaaaagtataaacaactcatcaagtaatcaatttctacatttgtgcaatacttttacttatatgcttgatacttgtgatatggctttatcctacagttatctaagaatattcatcaaattatttcgattgccgtgatgaatgaattggccaggtcaactcagatagcacttttgttcacaagataataaaatccaaatatgtgcattgatagaagcacatgtaatgcctcttagagtggtaaagttacagacctatttggtacagtatatttagaaactcaagaaaatactcaaataatagcaggaatgaattcttaaatatgtatttattttaataattttcttttttaatcagtaggtaataactacacccttctgaatgtcacaaaagtcatgtacagcggagaagagacaaacctttgggtgctcatcgatgggctggttccttttaccaactatactgtacaagtgaatatttcaaatagccaaggcagcttgataactgatcctataacaattgcaatgcctccaggaggtaagtctatgcaaatgttggctatctaattttatataaatgccctagaattaagtttccattgaataccttgtttatttttagaggtattttattttagaacttagaggctcaattgtatttctggttcttttaatagttgttgttttgctttgtttattcagattctttaattgacgatcttttattgttttgttgagactgctttcatccacctcacactgtgtgtatgtgtgtgtatataccatacacacatacacacacacacatatatatatctggatttctgcatgttaagaaaattgggaaatgattttgttcaaggcgttacttaaagccaaaatttatatttgcaatttgagcttccattttctactgcaaatggttctcattcctggtgttctaaataactagttcaattgtatacttaaagtacttcatttggcaaaaagggcagggtgcagatgatagaataggaaaattccatttgcactactggaaaacacctttaaattcctgatcctaataattacagttcagcagggccacattcatgtgtgaaatgtgatacagtctgcatatttttattttaaatatttctataaaaatcgacctattcacaattaccattattttgatgtgccttcagcttcaccatgttttaactcgttgcgggaaataatcgcattgaggaaaacccctctagggttgacatggatggcccttgaacagaaagcatgcctcaaaatgttaagagcatgactctcaattgagtgctaaagaatgtgtgttttctgaaaatcctgaaggcaaaggaccccaggacatccagcatctgccctgtagcccatctcccaggaatgagtatattctgaactaagggagaatgtcacaatcttttatcagcaatccgaagggcaggttaaccccacttccagttatgaagagtataagaacacaaagtgctttatcactggagaaaaataaaagggaatcttcagtttgtatggaaccgctcccctgcaaaaaagattcattacttgttgtatcataaaaccacacactattatctaccttttatgccattattaaaattaatgaattgatgtttactaaaatacttgaaactgtaaatgtcagaagctacattacttaagaaaagaatgcataaaagaaacttttgaggctgatcaactcaggttagtatcatatttattgagacaataattttaaaagggaattgaatttagatatatttatttaaaaattgagactgaaacccaaaataaaacaaactccccccgctaaaataaaccttaggtattcatatcttcatttttcacttcaatacacatgctaggaaggatagaaaactgtgatggctctaaaccttagaatataatatcctttactcaaatttagaaattaaagagtaatcagtgccataatggaggttttaagttatatagtaataccttttctacaggatatatacaatatttaataagcgtgtttattttagggtatttatactgattaaatagtttgtgatttacagtaatttatatcatattcataaaatagggcaaatttaattcattgtttatgtttttaggaatgtatggtctaataatttgttatttatacatatatcaagattcaattaaaaatagcaaggtcctactgctaacggaatatgcgctatgtgaatatacctgtcagtaaaagggttaatattatacaaatagaaagaaactaaaatattgttttatagtggtgcagtcaaactgagtaaaccattaactgaggcttatcttcatctttgctctgtggatgcttatctgtgtcattaccataatgcactgcaggcccacactctctgggcctgatgcaatcctccactttatgtattcagaaatctagaatttgggagtcagtccttcaccaaagaggaagcaaatgtcttcaaagacagacagtgattcgctaaagtttattatggccattaggacatactttcttttttcattagattgttgttgattacaattaggaaacgtatagctttaaaattatcttttttatgaccttgtggcagtttaaaggtgatacctcattgattaaataggttttagttcatgcttccttttacttaatgatctgaaaacatattatcctgatttacacataaaaatcatgctgaaaagcatgtggcattcactagaatatgtgtgtttaagtagaattaaattagtactgagagttattaaagaaatcttccatgcctttgtccagtgaactgtgtttcattctgaaatgaataataaatggaccaatatacggaggcaaaccaacttatgggcagagaaggttctatatgctatttacttttccattatagttggattgttatcattattgccatttccttgatttcaatattagatctctcttatggtgatgttgaattcctagtatctttcaatgctgggtgatgcaagatttgtgatgataatatccttagctatgcttcttttgcatacttttaaaacataataagaaaagagttgggcaaaataaaatgctcttttttacttcatcaaatatttgctatcaaatatgacctggaaaatcccctttacccgtttaatctggccaaatcctactcattttttagcctcaaacctagaaattggtctatcagaaagtcatgttttgccaacagaggctgagatagggcctttctgtatcccagagaacagttacattatactgaaattgcctgtttaatctgtcacaatcactggttataagatcctatagagtaggaactgtttcttactcacatttctatcttcagcacctagactaaacctgacacatggtaggtgcataatgaataattggtgaatgaataaattagtcaagattgcttaacgacttgttttaaattttaagcttattattactcaggccctccaggcctcatctcaacctcagcaaccttgtattttagccagctgtgaaagagaccttctctgtacaccactgtccaatgtaggaatgctctggttatgtagataaaattgggagctcaaactgtaaggagggtgagtgtattggaggtgagaaatattctcaagttatgccaactcttcattcttttattcttccctatagtggttacttttctcaggtgagcatagaataaacaatccttagtttagatagtaatttggaaaggagaggtgaaagggtcatactccaaagaattttaccaggatacatcatctcttaatttgtagtcaggacacatcttatttgccagtcctacctctatttttctgatgagaaaaaatatataattaagaatatgataaacacaagttatttgaagatagaaattaaagtaagaagatggtgctactaataacttggcacatagatgaacagtggcaaatcccaattaacacacattttttatttgaaaaattcactttaaatattatttggacaactggaggggcgtctctgttttttccaattatgtagcagatccttccctacttctgcacactcaagttttttgtatttctacaattactatatttttaggttgtttgtaataacataatgctcatatttagcactaaggtattcttggaaataaaggatatatttaatcagagctcttgaatagtattatggtacaggttcaagagttctaggaaaagaattaaaaaaataaaaacgaatccaaatgttaatccataaatatgaaactttcctatggcctttaccccttcaaggtctggagttactaatggggttaggatttcaacgcttaatggggctcagtgcattagtgttttgtatgcatggaattcagcattcagtttaataagtggttgacattggtgatgtcccttaatttgcttaaatctaattggctcttttatcagtcaaacctgtatggattggcaattgatcagaaagggtcagccatgactctgcatgtagttaaatgatggaagcaccagttaaagtcacagttgcatgataataagcaaaagaagaacaaatgagcttagaggaggaaggcaaagaagcttagaagttttgcaggatcttcaagttcagaacaaaggcattatagagtatataaattttaaatacactgcattttgcctccagacttaaacctttttttttccagatgaactgaaatcttgtctgaaactgtctttgttacatcaaagaactactcagaaagctaaaagagacagaagaagcataaaagggcatagtttaaaatgattagtgacaaattccatactgacgagctagaaacagatttttaatgaaagttttatattattccaaaaggaataattctgtttatctttttctgaactgctttattgtaacagtgaaaggaacttggagccaccctggtttgtgaacctaatccaattttcctctgagagtaaataatttgtcatttgtacttttaagttgatgagaattattataatctacaaacagtgtaaaatactaggcttgagaaaatctgtttatttgcccaaatgtgttattagagaaccaaaaattgaaaaaggcaaaatggttgcgagtagtttgttttacagggtcttttcgactctctctccttcccctgaaccccctctccacttatccacctaaaatatcaatgagaaaaaaaagaaagaaagaaaaccattaggaagtaaaacttaggcacatcgcaaaagcatagacgttggagtcctagaaacaaggatttaaatccacctctttcactcactgcttgagtgactatgagcaaatctgcagatataactgagcttcagtttgctcatccattaaagaggctggatggtaattcccacctgactggaggattgaacaacatattatatgtaatgtgtttagcgcattgcctgtcttggtaaacatttggtgcttcctacctcttttgttctattttcctactaagactctttttggggacctggaaaatgccctatagaaaaagtaagtaaaaaaacctgtctttcacatagactgcagagaccagaataatttcatcttgctacatccctatcctttcctacacttaccccttaacatgttgacatacatatggccaggccagtaaccctgctaaggggtggttgtgatgcatattagatgatgaagtaagcaggaagcatgggaagtgattttctttttgaaataccttcagcatcctcctccatgacctccagatcataatttgcgaagatttttacatcaagctctcattggtcatcttgggatttcacatattttcttaatagaactcttcttctgtgtttatatagagctacttattaaatataattatgactttttaaaaaatgtctattattgtatattttattcacaaatgcttttttttacattgttaatgctagcccaaagcaagtaatttgaaattttatcctaagatgttttcatgttttcttaattgtcctcaaatacatatatttaaaagttacatcttggaattcaaactttttttcatttttcactaaataggaaagtttactagttgttcagccaatatgcttttgaataactaaataaaatgtttgcttttaaaagatgttagtatatgatttttgcccaataataccactaaaggaataatatattaatgactaacttttttagcttgaactactgaattccattctgtttagaatttaagagactggaatattctttcgggtattgctgtgtaacgagtcactccaaaagtcagcaacttaaaacaaccattctgtattatttctcacctgattgtgtgagttgtcagcatggttctcctggcttaaggaggctggactgggcttcttcagaattcccagaaagaaactcagggtttcaagagtcaagccctagtgtacaagccctgaaaacctttgcttgcctcaaactgtccaaagcaaatttcttgcccaagtcaaaaagcatgtatgctggaatgtatgatttactggagcctgataatttgtcaatcttccataaatgtctaagtgattggtttttagattgtgtatgtgtatatgtacaaacacatacatgcaagtattacagatacataatttttcttttaaattagttctgcttttgaaataatgatgtactagcaccaaaaaaaatgaagaaagcagtttactaaatttttccttgaagaagatataaaaaaaaatctttccttacatgacaattaattttgatgttttatttcagtataaagatcaataaatgtatatcaatagattcttgtttaaaatgtttgtagctccctattggagggaaaattctgatctcttcttataagtaggtgatttaaaaaaaaatcttagctatttctcaaatctaggccttgggtattctgatttctgcttgtaactttgaactgtgagagtagaaactgtgtgtaatttgaatattttctgtagctccagtgtctggcataaactatttgctgaataaattaccagagccctttgtggcagtgataacttggaaaataatcctgaaagttatattttgctattgctgtgtcttttacttggataaacattttccagaattaaattcaacatttagggtttaattcatcctaaaattatttttagtcctgttaagattaccataacagtgtaaaaatacataatataggaccctctggaggtatgtttataaatttgtgtgtgtgtttaattgtctattttacctaccattttattttttatttttaaataattccatcttttatattatgtttaggggtacatgtgcaggcttgtcacatggatatattgtatgatgctaaggtttcaggtatgattgatcctattgcccaggtagtgagcagagcacctaatagttttcagttctttgctttctcccactgttccccttctagtagtttccactgtaaccaccattttcaattaacttatctattgtgattggtggttgaacacttaactgaaaataatgattaaaacagaacatccaaaaatttaaatatatattaaacacaactttaatttagaacacataaatatatttatctatatatttatccaacaatcttgttatatagggccaagttgttttcttggagtgttaatttagtatttataagtccagcatatttgctgccaaaactatattcataatgcatagtttgatttccactttgaaaactcctttaaaaggagaacaaaaatttagagataattaaggaagaatctaattatagaatttttcaggcttttgtaatatcctaagtcttttagttatttttcctgaacgaatttcacagtattgttttattaagtcctcactgaaagtttttcaaagcagtaaattttcatagaaaacggtttctgttaacagtgctcatcagtttaagcattatttaattaaatgacataatcataatgacaaccacaattgacatcacaggtttaaaaaatacagctgactctttgtgagtgtataattctacctgcgactgcagaatgttgcccttgaactacagagtagtcaactatccatctctgcaatacagagtaaatgtaaattttttattaatctggcaagtcagataagaataggtaggtaaggctgggcgcggtggctcacgcctgtaatcccagcacttcggaaggccaaggagggtggatcacctgaggttgggagttcgagaccagcctgaccaacatagagaaaccccatcgctaccaaaaatacaaaaacttagccgggcatgttgtaattccagctattcgggaggctggggtaggagaatcgcttgaacccgaaaggcggaggttacagagagccaagattgtaccattgcactccagcctgggcaacaagagcaaaactctgtctcaaaaaaaaaaaaaaaaaaaagataggtaggtaaagcaagtgtctactatttaggaaaaagacacgcttccaaagtggcagaatgatccaccctcagagcagcctacccaagtaggagaggcaggacaatgctaccaaattcttctcttaggttaagcattaccacagctctgccttaaaagaaaaaagaaattattgattatatcccttcaattgattagggactgagtctgagatttgtggcataacttgctcagtgaacttatttttctccttcagtttttaaaggaaagaactgagctttctcttctattttcaaatttcaaccaaaatctctttctaagaccttagagcaatgaaatgtgtgggtagcactatcaaccagccaggtggagaatggtatttttttttttttttttttttttgcagggtctctaagagaattaggggcaactagaactggctcaaaaagcaagaatatacgaaagagcaaaagagtaaataaataagaattgcaaaaacaaactctattgtatcttgcactttcttcatgcattgtagcactgagaattgtaaaatatttctataccttttgtttgtttttgttcttgtttttttgagacggagtctcgctctgtcacccaggctggagtgcagtggcgcaatctcagctcactctatgccttttaaaatcaacttagtacaatgtcaagatgctactttttaaaaataaaactaatggttctcaaaaatgtgaaagcttgcttgccgagtacagatataaagctcctcaatatgtgttttccatttttcatctgctctgtatccacttagatttatttgaaatatataaatagaaacattaatgtgcaggtggcaatgggatatcttaaaaattgaaagagtacaaagggatggagattttaaaaataaacgtaggttagcagctgaaataagcaataggctaagatggtatattcccttattcagagggtagaaggaaagatgagattaactgctttttataatgtaaaagccacaatgaagatacaggatggtgaggaatagcattctttaaaacgacaacattctaccacataaacagatggtttgtctttaccttcagtatattaaaagctacacaatttatattacatccagttcatatgaatctttcgaatagttgtgcataatgttttacttctgtgtatatcttccaaatgtgctgctattttttccctggaaaaatcaacccattgaaagtaataaagtaggagaattcaacaaataaaaagtatttaaattcttaataaaataaatagtgtgctttcaaaaacacataccaggccatttaatttaacccatgctttctcccaggtacgagaatagaaccaaaggatttatgactgtcttaaacatgctctcaaatcctttcctgaaaagtgttacctttacttttttggaattgatagtttaacctgctttgtgtgtgtgtgtgcatgtatgaagaggtatatgtttgtaatattacatatcataagccaaagagagggataaattcctgtttcataatttgtgaacaattttttcactttttgtattcaccatcttgacaatgaacttcctgcttataaaaacaccttagaaaaagactaacttctgagctatggagaagagggaaggaaactttgaagtgtgcttactatggactcaacaagcctccagcaaagggctgccagctctccatatttgcatactctcatgtggattatatagaaatacacacgcccacacacacaattaagtgctatctttaaagcatcctggggcaagagagagagacttaaaaaaataaaataaaatcacatctttttcttttttaccaggggagaggggtgggaaatattgttcctttaagttccattgatattttctaactcacatttttaaaaagaataagtacaattcattttctttttttttcttcgaagacggctttatccataactttaagcttaaaaaaaaaaatcatgtctgtctgactgacactgcagtctaaaagcaacttgaagttttatttgaatttttatagtgccctaaagaaatttttgctttatttctttaaaataatatcttgttcctcattttttcatagacaaactgtatgcctgacttgcataaaattctatgaacatttacctgcctatataaatactcacaaaagtgagaaaattcttaatatgtcttagatacttagagaccatatttccaacctcttttcatcagcagcatcaagaaaatccctttttctatctctataaaggcatatagaccccccagagtctaaaagaaaacttaaaaacttaaggaagaatagattttgacaacagtagggaaattcacttacaaccactatgcttttcatgattgttaattaattgggacaaatgaaactagaaacatgagggtatctaatatatactttattagattaatccctcttacactttgatgaccattttcaaatgtatactatctttcatttttatttaaatgtttcgtatgcttgtatcatgtcttatctactagatggggaagataaaacgaatgggctgggtgtggtgtctcacacttgtaatcccagcactttgggaggctgaagtgggaggattgttgagctcaggagtttgagaccagtctgggcaacatagtgagaccccatctctatttaaattttaaaaagaagaagtaaaatgaaaaaaaaaatgagtgggtgaatggaggtagacagaggagtcacagctggtctccctttttctttctctatccctctcaccatttaccttggctcaggcatataataggatattagtaatgattactatcatgctcttgtgcagtcctagtggcctggggctatttttgcacccagcataccttcaccctttcttttgatgacagggctccaatttccctctcagcaccctgggctctttcaagatcagaacatgcacatgcgctgtgtgtgaagttgactgcatcaccaggtctgaccaatgaggacactgtattctcctaaccacagtgattttttttcaggaatgacaggcattccaatcaaagccactgaattgcagtaaaccagtacagtaaacagaggcatgtctcttgccctgtatttgaatatgggattcggctcaatttgctgccagccatgttgcccctcaaagagtctgagaaatttagtcagcaaggaagaaagcagagtgggtatgagagaaggaggtagactagattctggtgacgtcatttgatcctttgaatccagcattgccaaaacccagctctttcccttgagtgtttttttgtttgtttgtttgtttgttgattacaggaacccactacccatctcattgcttaagcctctatgtgttgtgttttctgccacttgaaaacaaaagcatttgccacaatgcttgagagaaaggaaaacaagtagagagcatttagagaagtctcatcacttcctgaaaatcatgccaaatgctaaacttaacatatgtgtttggcttttgcttgggctctcaaattaggaaacctcaagaagtaagctggatgtcacatgagataatattttctaaaactgtgaaatggctcatcccattctgaagggtctcctcagagccacttcatttgacaatcttctgagctgtttctccactattttcaggtctcagagccctgagttctagtaataactcttgtgctaattagctgtttggtctgacttaagtaactttacctgactatgatgttggtctcttatctctaaaatggcagatgtgaattagatcagcagtatctatagtgtgatcccagaccaggaacttcaacattccttgaaatttgcttgaaatgcaacttctcaaaccctactctcaacctacttaaccagaaattctgagggtggggccaagcaatctgtgttttaatgagattccattaccaactcccaggtcactgggtgccttcacaagtttgaagaccactgagctagaccatctttaaaatactttcaaagaaaaaatatatgatcttgtctatgactttattccatattcatatttgagacaaatactcagggaaaaataggtataataggcctccatgctcaactggtctttgaatatataagtcacattcgtagggccagaggtctttccaatgtaagaaagccatcgtgttgctcacagtcttcctgaatgggccaggaacagataccaaagataaccaattccagatgttgagttctacctgtggcaccagaaagcaacaggcatgatgttttatgcactggggaacactaatcagccctactgtgaagacactgtcagctaaatttcctttgctcttcaacttcttcacagaacatctgctataagaaactccttgtaactaaaacctgagtctttcccctctggggaattttctttaatgagcctcttgtggctacatctgtacagttttgaaatatgtttcctcaagtcagttacatcttcatcctggattctagggtttgctgtctattggacctcatagctaagatttttccttctaggagttcacaaacacaactccagagtaggttgacatagtgcccagtatctagagaaaaattaagatcatgtaaccttttatttgctaaaaagagatttttgatgttgtgatcactcataccaagatagcatttattaatactaggtgcaggtgtggttttgcatatattaactcattttattctcctcacaaaccctgtaaggcaagtgctattattatccctatttacacataaggaagttgaagaaacaatattggcttgcaactagtaaaggtcatcttactagtaaaaggcagacactgtatttaaacctagagactgactatagaagcctagttctgagccactatactctattgttctactgactgtagaactatactctatttcttctactgactgttcatatgctctcttggcagcagcaacacagattttgatgccccactaatcaatgcagatctgaagaggtgacttgactctatagtagggtcaaatataattttaagggtattgttggttgaactagtaggtttttaaatcctgttgcagatggcctagagaactgtcctcagtgactgtataacccatgctctaaagtttataatgtcataagagaaaaaaaatgtaggtaaaacatgtttacagccttacaaaaaagcattaagcagaagcaatattatgtggtacgtaccctgtgtggagaaggcaaagaaaccaaccagttggactcatcctttgccagtgtggatataagtacttaacttgcccaccaagtattttgcccaacttctgtcatatttacctatgaacttctattataaattattataaattgtgatcttctgattgtacatagtttgcattcttgtgaagagacttaatttatctaatagtgttaattttgaaaaattaacaaactttcttaaaagagagcaagaaaacttatatttgtaaaaactaatgaaagaaagaatctttttcttcctgtactaaaacaattttctgtgaacagttgaaaaaacactctagtcaggtgaagacacttattcatatgtggaatattctagaaataagccatgtgaacagtatgagtatgtgggaaaattgttcactggaatggccacaaaatgaccatgcgtgacctctgggccataagaaagcaggaatactttcctcatcaaaatctgaagttgagggcatgatcacaggaaaaagcttaaatcttattcccatggttgatgctataaatcaagtaagcgtgtatcttagactgtgcatttgtaaagcacagtgtctatcaaaatatcacaattcaacttatccaccacttgctatccccagcattttcatttcctgattgtgtgaccttgagaaacttttctcctctctaagcctcattttgctcatctgggaaggggtttcataattacagaactttcctcaatgggtttagacaaggaataaagaatgtgtgtgcactgagattagctggcacattaggtagctgctcaattctttgtttaaaggacataaagcatgatatataaatacaaaatatatgtaagcttatcactattcagttgaaaattaacctgtaaacatctacatttttatcttctttgatgattccaacagctgtctctaaaactaagtgtaaggaaacagcagactggttgtggcatattaaattataagtgaggactaatttgaggatcaaagatgctctttgggagatatcgcctgactagtaggaaaagcattagctgtctccctctgtctcatgtatttgttctctctgtcttggaaatatccttccccacagtttctgaatcttgatgtttaattgaacacaaaggtctttgagaaacacaacagggggttgttcctggtagttctagcattgaggaaattgaaatgtacattttttttctcatttatcaaagaagggcaagaatctaaactgacattttatatcaaatgaattatgaactgtgtactttgtacctaagggaacaacaactaaattagagttttagttaagagagagagagagacaaaaataggctttgaataaaacatacagtaatttctgctactgtgcctgacagtgacatggccagatacagttctattgtagaactagtgactggatgcaggctactctgaaatctttaaatgtatttgagagaccgtctcagaaaaaattaaacctaaatttcttatgttgttagactttatggtcagtgaaatagtcttgataatctaaagttaactttcagctttttatcaatgcttactttcttaaaaaaaataatagttgcaaagttttacttcttgagaaagtatgaaattataggttgcttgagagggaaaatacaatgcagaataaaaataatatatatgaaaatgccacattccatctctcctctgattatctgtaacacctacacaaatactacacactacactcatatgttattgtgctcataaagagtgtgaatcctaagatcagtgggacttggttcaaatcttaatttcccccctcctactagctgtaagagcttcggcaagttatacaatcagagtctgctttactttgttcttctgtaaatggtagtaaataataagcactatctcacaggattgacactgagaacttaattatgatgatgcctgcaatagatacaacgtgatgcagtacacatagtagttgttacgttgcacagttgtttccttccctatgtgagaagattaggcagcagcaaattagaactccattatttaatggctgctgattcctgaagtataggaagtattagaattaaaattttaaggagaaggaccctataatgtctgtgcaatatatctaataatcattttttaaataaccaattgaaaattcttgggaattgggggtgattcatgctttcttcttctggacaaagctatgtattgattaccatatttttcttcacaaataagtattccaatttatgcaatataaaaataaaagaagcgttattaatatgaatacatttgttttagacttctaaatccccctaggttcataaacctaaaagtgacaaaattccttgatattaatcccatatgctttctgatgccaatgctatactggataataattttgtgactaaattactagaaacaaataactatcactgatagcctgattacaaattttcttcatataattattgatcattgctgtggtaaaatgaatatcataatttttattctcaaatgttgattctaactctactacttataaggtgaaatcagttcttagaagtctttcagcagtttaaattctgccaatgactattgttttattcttactaatagataatgtgaaattaatggcatgttgaggtaagggatgctgtcttgtccgtttaggcggctacaacaaaatactatagactaggtgccttacaagcaacagaaaagtatttcacacagttctggaggctgggaagtccaggatcaaggtgctgacagattcagtgtctagtgaaggctcttcttcatagacagtcattttctttactctaacttcacatggcagaaggggtgagaagtctcccttgggtctctattacaagggcactaaccgcattcatgagggctacaatatcataacctgatcacctcccaaggctccatctcctaatattatctccttggcggtgagaatttcaacgtaagaattataggagggacatagaccatagcagacaccccacatttaagtattttaatgctagatctagttagtatttgagtaatttaattaataaacttgaatattatatccaatcccgttgttacaatgacttttataaccaatctgctctgattcttcaatcattaaatgactaaatttttctccactattcaaagatcacttaatttcttggtatttgattgtatcttagaatagtggattcaatggcaccatagaggaagagtccaactctaaaatataatggtttattttctacacgacctcagtcattttttgttttgtttttgagaaaggctctcactttgacaccctggctagagtgtagtggcacagtcacagctcactgcagcctcaatctcctgggctcaagcaattgtcccacctcagcatcctgagtagctggcaatacaggcatgcaccaccacatccagctaattttgtattttttttttttttttttttttttttgtagtgatagggtttcactatgttactcagactcgtctcaaactcccgggctcaagcaatctgcccatctcagcctcccaaaatactgggattataggtgtgagccactgtacccagcccctcagtaatttattttgctatttttcttgttggatacattcaacaagggataatttaatgcagtcttcctgaaaagagtggctttgacttgagcttgaatttatttattgttaaccttgctaagcatatcaatttttaatttcacaaagactaaattcttcagtgaattattttaaatgaagtcaatgagcaatattagaatcaaaaataaaatagaattaattgaacagtattgttgtatatattttaaattatttttccaattgaagatatgctttaaacaaagggctcaagcaatcaggtactcaaggaaaaagaatttaatctatgctgcctagaaactaattggatgaatatgatcgtattcaaaataataggaatgctaagaaatgctcttaggaatactaagacgaattcaaatgtcgaaagcaaaggcttaactagagtgtctaaatgtaggaagtctctgtaaggaaaaggaaaaaaatttggttggtggtttgagacataacaaaaaaaaattcttctgggcattatgaccaccaacttcagggcctctaattagtctgacaaagtgacagttctacattctagttgaacaaataatgtatctaatgaaattcaaaatcgctatttttctctgagcacagtgagctgcatcattcacagctttggggtatttcaaaattaacagaggatgacttcagtctgtctgatgtttcttggttaacaaattcactgaaattgtcttgcagagcaattttaagcaattctttaatcttaaaccacaaagagaggtggaggtggaggtgtattaccttggtcctatggatgctaatgtgaagtggaatcttttatttctcaaaatggtcaacagcaattagtattcagtggtgtctttttattctggtgcccttgacccacctctgcccccctttctatattactcctattatatactgtaactggggatattcttgcttcttttccattctaattaaagcattcttagtgaacatgggaaccatttttcatttcatgaagaataattactggacctaggtgaaatctgcccattgggttttatataatttttgacaaatatttgcacgaattttgactgatctattcttaccatttctccgtgaaatgttggagaagttttcagttccctcagaacaataaacctaaatatgtacgtgaaagaccaagataaatgttgtaccaccttcaggttgtatttgctaatgtactttaaaatattttattttgtcactaatataagaaataatgatgactttttaacaatttttttttttatttttgcacatgtttctttcctagtcagagtttgacctaaatactcttctactacactagtgacaaccttgagaaatatcatttatttaggttggatctgtaaaacctatagctcttgttatacatcttgtttcttttttttattttattattattatactttaagtttcagggtacatgtgcacaatgtgcaggtttgttacacatgtatacatgtgccatgctggtgtgctatacccattaactcgtcatttagcattaggtagatctcctaaagctatccctcccccctccccccaccccacaacagtccccagagtgtgatgttccccttcatgtgtccatgtgttctcattgttcagttcccacctatgagtgagaatatgcggtgtttggttttttgttgttgtgatagtttattgagaatgatgatttccaatttcatccatgtccctacaaaggacatgaactcatccttttttatggctgcatagtattccatggtgtatatgtgccacattttcttaatccagtctatcattgttggacatttgggttggttccaagtctttgctattgtgaatagtgccgcaataaacatatgtgtgcatgtgtctttatagcagcatgatttatagtcctttgggtatatacccagtaatgggatggctgggtcaaatagtatttctagttctagatccctgaggaatcaccacactgacttccacaatgtttgaactcttgtttctttatttttctctagagtcctttctcagagccaagggtgtcttgacaagtaaaagagaaaaaagttactaaacagagagaaagagagagtaacagactaagaaagacagagacaatttcttcaaacctctactccaaaaaatcctcctcaaaatttaaacgacacatttgtttaaaacctcaaaattcttgcattctttcaaaacactgagctgttagattctaccaacagtatccgctctccaagttagttctttaggttcctgtgtgttggatggggaagaggtagggaaaggaggctagctaccttttatgtctgtgaggaagggcaaaggtctggtttggctaattttaaacaacattgtttaaaataacaggaacttgaactttggagacagttgctagattcaaacagcagcacaaacccctcattacttgtgtggtcttgtgcaagtcatttatgttatgaagcttcagattccttgacccacctacttcacacctaggactattaggaggattcagtgtgatgatacatacaaagcatttagtccattgcctggtgtacaataactgcccagcattaactctgacattgtagtgtgcttatgtttacaaatgaatatcaagatgttagcattgttcaaggggcaattaaccaaagtcattcattaaagttgttgagttgtttaataaacaactcaattaacataaagactctttaccaaaactttgaactttgttcaaatttcattcatccaaaagcagttgctgagctctttctagccaccaggcataactctaggtcctgtgcaaaacaggcttttggagcagatggcgtgcattccctgatggaactgaaggccctggccaccattgtggtgaagttcataactgcacttactgcatgttctggctggctacttaagaattccctaaggagatattggatagatcaaggtacttagagcttggtttcaccttctagggggagaaagggttgctcttaacaaaaactaggacaataaatttaaatgtgtttataaataatgatgtaagacaactatgtcaatgttgttaaagttggctgttacttttaagtacaaaattgcatattccttatttggtgggattactgtacatagttatttttagaaatcagaaaagttaattgatttactgtgattctctcgttttacaaaaatgcaaattgttttattatataagaagagtccattttagaccaaattcattcccataaaatgaaaacttcttggaaaaacaacaaaaaagaactttttaagaaaatgtattgattggtaactcatgacatttcttttctgttttgctttttggctcctgtgaatctcagaaaaaaaaagtctgttgctactcaggaggctgaggcagaagaatcgctcgaacctaggaggcggaggttgcagtgagcagaaattgcaccactgcactccagcctgggtgacagagcgagactctgtctcaaaaaaaaaaaaaaaaaaaaaaagtctgttgcttgacaatggctaaccttagtagaggttttgtggtacagttcactgatctttttccttcattattcagctttgttttcttgagttttatattaaatgtttttaaaaatattttggtaattatgcaggttaataaattataaaggatatctatagttttccccatctctttctggcattctaatgacatgaatgcagattccttattgatccatataagaatgagctcccagaagtgagtgtaatggaatcaagtagccagaaatacttagtaattggattgtttttcacattctgcactcaacttttatggaaaaaaaaaactcgaatcaaagtatatcaataagatgataaatccattcattccttttcagtatccagtccagtccatttaccagggagtagccaccaccatctgtgcctcaatattttcaaactaaacaacaattgtagtttctgtgcttaaaatattgatggaattagtgattccccatctccttcgtatacatttcagactctttatctgtcctacaagaccagtgtctcccacccttgctgccttgcttttaattcctcaaacagtgagatcaccatagagcttccggcccataacaggtcagcaaagtcttagtcatttaacaggtccaaacttaaataccacttccttagaaagcctttcttctttcaaccaaaattaagtcggccccctttaatgatacctcttagcacctctgttctccctcctagcactttgtgtacattttaactacatattgctttctatttgtttgatgccagtcttgctccacttgacaatattctcatgcccataatggtgtgactctggctagtttgttcttcattatgcacccatcacctggcacgatgcctggcaagggagtaaaggaggatgggtagatcagtttttcagggaatataaaaatgacagcacagttttatcacaaatgtttaatctttctgtatttccatatttatagcttggagattgcatagtaaacaggaaagaggatgaggttttgaatcaaaattctcatgtttgaatcccagcctggcacttagcacaatcacaaagaactgtaggaggaatgcaatactcacatcatctaattcatggtatggctgcaaggccaaatgagaaaaatggagatgcattcaaaaggtgagagctacatgagaattcatgaacacaaagaagggaaaaacagacacagggcctactcgagggtgaagggtgggaagatggagaggaacagaaaaaataacctttgggtactaagcttattacctgggtgatgaaataatctgtacactaaacccccatgacttcagtttacctacataacaaacctgcacatgtacccctgaacctaaaataaaagttttttaaaaagtaattgaaatgttcgtaactcaaaggataaatgcttgcggggatggataccccattctccattgtgtgactagttcactttgcatatctgtatgaaaacatctaatgtacttcatatatatatatatatatatacacgtatatatatatatatatacacatatatatatatacgtatatatatatatatatatatacacatacctactacctaccctcaaaaattcttagaaatttttttaaagaataaaattagacccctatctctcaccatgtacaaaaataaaatcaaaattggttgaaaacttaagtcgaagacttcaaactatcaagttactacaagaaaacattggggaaaatctataggacataggtctgggcaaagatttcttgagcaatatcccacaagcacaggcaaccaaggcaaacataggcaaatgggatcacataggttaaaaatcttctgtacagcaaaggatgcaatcaacgaagtgaaggaacaccccacagaatggaagaaagtatttgccaactatccctctgacaagggattaatcaccagaatatataacaactctataggaaaaaaactaataatccaatcaaaaaatcagcaaaatatttgaatagacatttctcaaaagaagacatacaaatggcagtcatatgaaaaggtgctcagcatcatcaattatcagagaaatgcaaatcaaaactataatgagatttcatctcaccccagttaaaatggcttatgtccaaaaaacaggcaataaataacaaaagctgtcaaggatgtggagaaagggaacccttgtaccctgctggtaggaatgtaaattagtacaaccactatggagaaccatttggaggtttctcaaaaaactaaaaattgagctaccatatgactcagcaatcccattgctgggcatacacccaaaagaaaggaaatcagtatgttgaagaaatatcttcattcctatgtttgtttcagcactgtttacaatagccaagatttggaagcaacctaagttgcatccatcagcagatggatggataaacaaaatgtggtacatatatacaatggagtactattcagccgtagaaaagaatgagatccagtcatttgcaagaatttggatggaactggagattattacattagatgaaataagcctggcacagaaagacaaatgtggcatgttctcatttatctgtgggatctaaaaatcaaagcaattgaactcatgggtttagagagtagaaggatggttaccagaggctgggaagagtagtggagggttggggagaggaggggatgcttaatgggttaaaaaaatagaatgaatgcataagacctactatttgatagcacaataaggtgattatagtcaataataacttaagcgtatatttttaaataacttaaaaaatgtaattagattgtttgtaactcaaaggataaattcttgaggggatggataccccattctccatgatgtgcttgtttcacattgcatgcctgtatcaaaacatctcatgtgccccaataaatatacctcctatatgccacaaattaaaaaaaaattaaaaaattaagaaaaaaattgttctcaagtgattaaaactaagatggctgggtaatttaagctctgtattgggtataagcagaacatactttttctaaaccttgtgaattttttaagtggttacaaaatattataggatcagactttgtaatttcataaatattattattacaaataatgtatccagagcgatctcaattatgaagtcatcaaggatgggtaagaaaattacagagagaagcaataaatctgaatgtacagtgcttatcttcaagtaacttaaaaggaactatgaacaaatgttcatagttttttgggatacattaaatgacttagtgatacttaagaagatactttgattgatgttactaagaaataataaatgagtaaagcatgattgtagttatggtgtgagtaatgatatgacaggatcatgtgatagacattgggggtaagataaagatcataacaatagcaaacacttatatagtacttatgatgtgtactttattatattatgtatatattatattgtgtaaccacttgatacattaacttatttaatcctcccaaccacactctatgaaatatataccatcttaatctttctttcgttgatgaagaaactggggcacatagagattttggtacttgctcagtaagtagcacaatcaggatttgaacccagataagttggctcttaaccaatacacagatctgcctcttttgtgatttaatcaaaataaactctaaataaagacattacaataaagacattaattagctgctaatcagctaattaagttaaaaatgtaaaaagtgctaattgaacataaaggagagtgacaaaagtgtgaaatgttcaggattatctaatataataaaaagcttatcaaaggtaaaaaagttttcattggaaaagattcatgaacaagcattctagaaattaagaaatggtaaatggccaataagcatgttgtaaatatttcaatcatagtcttttggttttcagtgctatctatagactgacaccttccttatgtatatgctcaggcctaaacacatgaactccagtcccccgtagtcaatggccttctaaaaatatcttaggcaatccagaaccaacaaattttttttcttcctacaccaagtgtccctcccttagaccagaagcttaggagtcaagcatccttctttcattctctacatccctacatctgttccatcaccaaatcctctatgaacaatactttccagactcacgtcaatgaggcttctgccttgggtctgcttcatttgtgcttctcccagtgatctgcaaatctcaactcagataaaacctcatcagagatgccttccctgcctatcgcatctaacatgctaactttgctccactccctccctcatcactctcaatgcccttatattagaaatgcttctttttttctcattaaatgttagtagactttatttttaagagcagctttaggttcacagcaacatcgggcagaaggtgcagagttcccatttatccttgcctccacacgtgtatacccttacccattatcatcctcttccacagagtggacctccactgacatgtttttattacccaaagtccatagtatacactaagattcgctcttggtgttgtacatcctatggctttaggctaatatataatgacatgtacttaccattatagtgtcatatgaagtagcttcactgctctgaaaagcctccgtgttccatctattcattcatacagccctcccccaacccctggcaaactctgatcactttttatcgtctctatagttttgcctttatctttttttgtctttcatctcacccctcttaataaaaaccattttaatttgttcattactatattcccaggttatggaatagtgctaggcatataatagatgacttttaaatagctgctgagttaatgaattattatatatatacacacacatacattatatcagtcatatgtaattatatacaaattatatgacatgtagatatataatatatttaatgatatacttgtattattattatatatgtatatatagatatatataggcattatataaaatactcattttgatggggatactgggaagtggaccactcatatcttagtgatggtagtataaattcaatgttctggaaaacaattagtcaactaatatctgaaatagtagagcattcatcaacgtttacccgataactctaaaaagtgtccctaaagatgcatcattctgtatccatcaatgtcagctttgttaagtgaatgttccacatctataaaaatagtacatgcaattatttgaaaagttatgctaccaaaaatactgactggcatatatagtaaagcaaataaagtttactaaataatatgtaagtattcatcttaatgtttttcttaattatgtgcacatatatttgtatagaaaaaagacaggaaagattatctataataattttaccatggctatctctgggtagtgtaattatggatcattgttttcttcatttgttttataatctttaaagtttatatcataaacatatttgtacttaggaaaatacagatagtacttttaaaagagttctgtttagttctccaagaactaaattttatcatttgtttaataagtatttcatgagcaatactaaactctcaaaatttgttaagtgctctgaagtttacaaagataaataaaaagcatatctgctctcaaatggtttatgttatcattaccttggtttatcatgggacaaagcaataattagacttaaatttaaaatttaatggggttttgggagatgaactatggtcttgaaaacaaaagggacatgtatgaaaccacaggtttctatctactattcattgagacgttgcttagccttttctaaactcagtttttatatctgtgaaataagaacattgagagaaacgaatgataaaatgaatgtactctaaagtagtatttcagatttcatttgataatacctccaagcaattaatctcacttatgttaaaaatatttttcacatttttttgtaatttatttgtaaatagaaaatatgttcgggattctaacaattgttgggataatgacagaaataattttctctgcagatctttcccccatcaactcatccatctttcccccatcaactcatccatctttccaaccattgattcatccatccattcatccagtttttataggatctttcctagacaaagcactgtgttgggcaccatggtatctctttaattacttttctcctttaacagtcctttaagactatgtatacattagaaaataattaatctggtatggtcagctatctatatgaccattttgagtcagctacatagctgatatgaatgaacttgatgaactccaatattaagcaggccaaaattaagatgctcagtgaagtttcagcagcatcacttgaagaaaggaaagtcagtgccttcctgtgttgggctgtggcccaaacacacaaggagtgtaagtttaaaaggcattctcaaactggaacacatccaaatcagttaacaaggctagaagatggttgagaaaacatactatatggaaactagttggagagaacagagatgtttaacctgaaatggggaaatttagtggaaaggaaggcaaatgcttaaaaatacctgaggttctagcccacgaatggtaccagaggcttgctctcagggattagaggtaaggttctaaggagttcagtgttgttagcatgaccaaccatatgcactttttgcccaagatagtcccagtttatgcctgctgcatgcagctcagttcactcctattaattacttagagtgccccatttcactcagaatgtctcaatgtgaacaaaaggttatatttgccctaagttttgtagaacccatacaattctttgttctacatcagaaagagctttccaatgataaagactattcaataatgtgatgggacaacttgccaagtgactattttcctgtcactggtaaggcacaagcagagacctggggtcacctgtctgggatgttctaggtaaggattccttatttggtgagaggataaagttggtgacttttaagttttctgccttctgattttaagattctgttgttttgtttttgaatattctatggtcaaatatcagttccatgacatacctacgaaaacacaatttttaaaatatactctttctctcgctaacatgaagacttctccattttacatttcattgaatttctgtggatgttgactaattctggagatgtggcaaattcatactagtagttctgtgtgtgataccttgtggaatgatgggaatccctgctatgataaagaaataagaccgggaggtactgtttaagaatatgacctggacagaaaataaatccaacatttattgaaatttgtttatttaatattgtaaatggtttgcttttatatagatttaatatatttaatagttattctatattataaatcattcactatagcaggctgtttcagggtgtaaaattaagagcgcactgcctttgaacttaaacggcccatgttagaatcctcagtgtgccagttacatcagttctgcgatttgaaatgaaatatttaacttctctctgagcctcaccttattccgtatatcctacaaagagaaaacactacaattttggagtgtaattctgaggattagaaataattatgttaaataaccttgtacacagtatgctttcaaaaagttcgctctggtgaaagactgttttgtgaacatgaaatctattttaacctacttgtcactatttaatgctgctctgtttgtgcatccttgtgttcaaggttgactgtccatttgttagcacatctgcatattcctcataattaatatctttttaaatgacatatggtttagtgactggaaatcgagtcttgccttctgttttcaatttgttcatgactcaatgactcaatatatgtgtctgaactttaattttccattctggaaagtagaatttaaaacccttgctcatatgtagctatttcggaaaatgatgaagaaatgtgtaatccaaggattttgaatatgtgccaggctattcagcgatgcagcatataggtaaaaggccgcagtttctctaatgttaacagagaagcctaaatgagaatgccaaaaatgtaatccctgaagtgaggggataatttggggtaggctagagtcagattcctagtgaattagcaagaagcaccacatctaaatggaatgagcacaggaagagttggtgggagccctagggaatgaggctgagaacatcattaacctggatgaacaactgatagtacccccagggcagtgcttctgcaagccagggatctctgaaagacaaggcccagtgcacccctggaagtgagtttctaacttccgagtcccccgtagcatttatacctcttttgtgctgagtactctttttttggtgatacagttatttgagtcaggtctaatctgttaaacataaagtagattatttgattccgccttctacctattctgccctttccctgcctctaacaagaaccttgtgcagagtggtattcagtgtcttgtattatagaattgaatttgatacaaaatattacaggcttatttgatattttaatgcagcattttatttcactattttgaaatgcacacacacaggcaaaaaacaaaacacacctcaaaagtaacatgttggtgggatgtcctgagaaagaattcagtgcatatggaaagcacagtgaattcattttctccctaaaatattcttcttcttgtccccacagacttggtagccaccaactacgtttgtaaagcctctgtttttgcctttgagagctcactcccagagttttataaatctgcagggagcaaaggtttaggacatgtgtaaataaatcattttatattttttcgtttgttttattttgttttgttttcttagagaagtttaggacatgtataagtcattgtctatttggtgttttgttttcttttgtttttcatatagatgagagtccagtggcgtatatcatttttaaagtttaataaaattatacattcaaaagattataccatctcaattattccaatctgtgatttaatttattgcttaatgttttgtatgaatttgattttctgaagcaggttaaatttgaaattttattaaaaacccacttcctttgagtttatagattgggatagctgttttatctagtcgctgtgtagaattagtatttactggacaagatgtgttgattcaggaggttgtcttggagtgtttgccccgtgagggtcatattaaacttgagagaagttctttgagcaacagagcatcttggagacaatatatcaagctgatggatacagggctcttctgttaagaaaccagcagtggaattatggctggctcccagttattgctttggtgctaaggagcctctaaggattaaatctaggataaaaggggttaaacagaggggaaaggaaggtttccagaattcagtgttactggaagcatacagaatgagtagttatatacaaataatttaagatgaccattctgtttggaaatatttcacaatttaatatattcaaagtgtaccaatttagtggagcatattgttttgttattactcagaagagaattcgtgacatcttattattattataaagcctactttggggcacttcttcctactgtcttaatagaaaggtaatgtagtttttaacacataaggggttttgtgtgcatattaaaaactaattttttcagggctaatgacttgaaattcagaatttggattttcaattacattatactccttgatgtagaaaaattagacaaaaataatcaaaagagagacatggttttatatgttatacattgtatgcattttgcactttattttttgcctgtgttttcacagtgctcttttttctatgtatgcacttattataaatcaattaaagtatatatgtcaaataaattatgattgttaaaaaccatttgtgttcatagataaaaatatcaattaaaaagcctttagcaatgaatgtccttcaaaccaaaaatgtgaaggtaagaagtggatagttggccctggacagcaatcttcttgcactttctagtcatgccacacttttactaattgagagaattatttcatatcatttcctctttcttcaagcctccatttcatccacccaatttgtcactgagcctttgcttttattttgctcactaagaaactgcgcatcatcaaaggagatctttgctattattccatcactgaatctactcactgctctacatcttcatctgtgcattcacttttgcacaatgggagaactatccctgctctgtttggcagccagtgtgcactgactctcagttgattcaaatgtgcactggctcacctctctcttcccacactaggactttgctctggcaattctttcttttacggtatcatttcccctaatctgtgttagattcttccaacaaacatgcctatatgctgcaacatcttccagtctttagaaaaccttcctttgatatcatgagcttttctagctgctgccccattttctaatcccttttagaataaattccctctaagtgttgtctaagctcactgtatctgccctttaccccctcgttgtcttcacaaccttagctcagactgctatgcccagcactgcactgcatctgctctttgcaaagttatcaaatatctgcacttggccaaatgcaaagtttcaactcccagtcttcttcctccttaaactctcagccgagttgatacagctgatacgttcttcctttttcatgtgccttctttctttactcggcttccagtctgcaccttctcagtttttctcctacctcactgaccattccttctcagtatcctttcctagagaggcctcctcctgacctcaacattttggtggattccagggcttggttctcagacctcttctatactcattctatcaacactcacttcctagtttatttcaccatctcagcctttaaagatcacatatatgctgacctacaactcctatgaaggctacaactcctatgaagacttttcctctccctctcctccttagtccgtgttagccacactgttccttaaacacaaccagaatgttttcctccttactgcctttgaatgtactgctatctctggctggattactcttcctccagacattcggatggctacctccctcatgccagtgaagtctctgttcaaatatcactgaattgcattttcttcctataatcttcccatcgaattgaagttgttacctagtaactaaaactgcccaattctttttaccttctctttccttacactgctttatttttctacaaagcacttatggccacctggtattattgtatacacagtattcatttgtttaccacctgctccctccacttgaatgtaagctacctaggggcaggagtggtgtctattttattcagtgctgttcttcttccacatgaagagtactgcttagcacagagtggagccttaataaatgtttattgaacaaatgaatgaattattaatgaactcaaacccattacagcagattgatgaaacatgtaatctaattcttctgttctcatcactggtcattcattagcctcattgttcacagacagcttcttctgaattggagagtatgtaaaattgacacactacacaaggttatgtataaaataaagttgaaaatggaccctgatatttcatttgttctcattattttgatcacttctccttcttcaccaatggcctctggtaatttgtggtcattaggaacctatattacaataatcagaatgttcccaacaaagtatattatactagcaattaaattatgctaaagaaagttcaggtcagtccaatgtaataatagtaataatagttagtgactaataattaccagggtctaaaatcaggtgctttatttatatgatctctgaacttcacaacaattctataaaggaaaaatattatacctactttagagatcagaaaatataggctcggagtcattaggtcattttcctaaaggcagagttttgctgaatttgctttcaagtttctgaatagctttggaacaaactgatatgatttggaacaagctgatatgacaggctcatttgagttataccagttggaaaaaattaattaaataaccagagtcatcttatcaactttttttagtagaataggctttagttttacacattcctgttaggccttctagaaccattcaaagagatttccctggtagattgtaccaagcaggtatgttgaagtcagaacagatttgccggagactcaactagactagaaaaagtggtatgcatgttccaacttgcaaaattgagtaagggcaggagaagggataactctgagaagggtaattgtataaaacacatagggaaaaaagtttactttttatattttcatgggtgagcattaaggctggaatacactgtattcagccattcatgtttatttatcattccagaaaaatacaattttagctaacttcccttcctccaaaaaaaaaaagaaaggaaaagaaagccattgtgttcacatgtagtggtgtgattaaggcagcaatggatgatatcggggggaagaatatgagatctggactgcttcagtgttcaattgtttggtctgttgaacaaagagttaaatgaaaaaggtactttaatatttgcttcactaaattccctccatgttttcaattagataaacagaagtacaggtgggaatgtgctgcatattcatttgtcttgctgtttgggggccggcttttaagactgaaatactaatgtaattgtgttgaaatgaacaataaggaagtacaggagttcaggaatgaaaatgttaaattaaatggaccatgtttaacattgttgttgatcctgaggaacagtttttccagtatatggagcatttcgattccatccagcatatgttctccacagttttctctgctctaattcatctgtgtttttcgacagctccagatggcgtgctgcctcccaggctttcatctgccactccaaccagtcttcaggttgtctggtctacaccagctcgtaataacgctcctggctctcccagataccaactccagatgaggtctggcgactccacccatggatttctagagtgagcattctactttgtccattctatcagctgggttatacaatatagacataacatttttgaagagtaggtcagttctcatttgcaaaaaatataggttaccttttaaaagtacaaaaaaaccccaaacaattagaggataatcatttgctttgcaaaaatatctatttttcatttatgtagcatttaaagtaggatttcttcccactgaaacttttcatgagcacatgcattacataaagcaatgaaactaacaaaatgatgtctgaactgtcgctaacaaattataatacctattctacaaatccacatggcagtcagtctcaatactactaggatttacatctcgtataaacacaagattacagactcagccaatggctacttattttaaaagagatctcatttgatggcagaaaattacaatacttaaatgtatgttgacatcctctaaaatttttttgtagtaagaaatttacttgcttttatttctttgaatgtcgaaaacttcctaattgacatttatttcccatacaggttattttccaatccttctgcatcgttaagctatgaagtgagtgatctccaaccgtacacagagtatatgtttcggttggttgcctccaatggatttggcagtgcacatagttcttggattccattcatgaccgcagaggacagtaagtggtctgaacaatacacagccaaatgtcttctacatagggagcttaaaatgtcttcaattttttccaaagcaaagaaatgagcctcccttatttacttgttgtttagtgacaataaccttttctagggcaagagagtgagcaaaggtggtcagtctctccagaaagaagaataatgtggtcttggagggttggagggttaggcctacagacaggacaaagtaattcactataaattatgatatggccccattctatccttcagggtacatcttagcgccctgcaagagaaaggttgtcatcttctgctttatgactgaatgttctctgtttcggagaaattctggcaggcagaagaaaatgaaatatggaccttacttcatgaggctgcttacatatacttgttcctggaaacaggtttcattttcctgcttctactcataccccaaagacagccttcagcatagagaagtataatctgatagcagtatattacaaaaggtggattaagatttctttattcaaccaataaagagaattttctagttgttcactaaaaagttatttttgcatatatttgctagattatatttgggaataaatacatgactataacatttggttttatacaaattacctctataaaagcatatatatgaaagtagaggggtttttaaagaaaagttagaaattaaatcaagctacacagagtgaataaggacattgtatctttgaacagttaggttttttgagttaatcttgtgaagtcttttaatcataggcttcttaggcaatgttctctgctggcccattgccatgctggctctatatccaatgagaacgttaagtgactttcaaaagcctagatattaacacaaaagtatggtatttgcaacaatatcaattgtttattaaatgtattgttttatttctataatacctttaattgcattattttagtgaagataagacatcaaattagacattatcagtacaatctatcttgtttaaagttgactttatttttacaaaaaaaagccacctttatgagcaataatgtatgttacttaattcatttcttccaattcgtaattactccctgggagaaagttagctactttgcaaggggacactcagtgtttttgttctcaagggtatcatttagtaaattatcagcacagtacgataaatggcacccaaagtccagaaagcattaattcaccaccttttaggaggaacattacatacactctggggaatctggacaccatgatcaccagatttatggactgaagacttcacactcaaaatagatttttgaagaaacatttgaaacaactgaagatagatttgtaatctccttcttatatatagcagcatgcttgatggcactaaataaagattagccaaaaataattattcaacccactgcagaggtgatggctcaatagaatgcttggaagaagggagaaagcattttttttttggcacagcattctttattctcctagagaaagggcaacactcaaacttcctcagcggtaatctccccacaattttcactgaatgagggccatgacctgccatctataggcagggaggtagcacataaataagcaaaagtccaaaatattgtaaaataccaattagcatagcatcctttgttgagcaaacttacctttggtctcctttttactataaaacaagccttatagaccacacatacacatcgttagaattttcatacccagagaccctccattgttgtggtatttagggcttgagtttaaagtgagtggtattaacccttcattttccttaagtaagaattagtaacacttgaataaatagcaggtatcaactcataaccattatttgtgtttaaatccgttccccaaaatgaatgaactcttccttcctctgctttgtgtatacactgtgaagtcacatacatagcaaagaactggaaggaggccatgtgtacctgcaggttacgttagcagtgcacctgagacatggtgacagggtactgtatattttagatgtcagtggagatggatgccatctctgaaaggatatgcaattgagttgacaaagactgagtgattggcattgggcacaagcagtttttctgtcaaggctacaaagcattgcttataaaaccacccatgttgacagctccatgccagaatcacacttcttacttgatcctgaccagcacctcctgctcaccaaagtgcaattttctttctctttctttcttctttctttgtttctttctttcccctctctctctttcactttctttctttctcactctctttctctttctctctctttctttctttctctttctttcttttcttcctttccttcattttttgagacagcgtttcactctatcgcccaggctggagtgcagtggcaccatgtcagctcactgcaacctctgtctcctgggttcaagcaattcttctgccttagcctcccaagtagctgggattacagatgcccaccaccacacccagctaatttttttaatatttttattagagatgggtttcaccatgttggccaggctggtctcgaactcctgacctcaggtgatccagccgcctcagcctcccaaagtgctgggattactggtgtgagccacctcacccaacccaaagtgcaattttcaatgtagaaatttcacatatcgtcttacagaacgaaacagagaagtcgcctcgtgcccacatttaaattccataccatcaacaggcacctttctgcatcagccacagcctcacagctttccagtgccaaaatgggtcaccaatggcaatatttttagtgtgacatttcaagacagtgattttcagcaagcctgtgacacaggtgaaaccacaaagagaaatctaggcaggcaatgagctacagccagagaagcaaatgcatgggtgcagagaagttatcatggacagggaaacaggatgtgaagaattttaatagatttttttttcaaataatttgtcatttacaccagtgtgccaccaatatccagttccatgcatttttaaaaatctagtgtgctgatgccaaataatcataatgcacatttcctatgaatattttaaatcctgttaaatgtgtgttaataaaagatgtttgttccagccaatttggtcagtgtagtgtttaactggttgcaaccagataaatacaaacaacacattattttttaaatgtgctgctggcagtccaagcacctggcatgtccacagcttgcaaaaatgtcctaagattatgttaggcttgggagcatgtgattaataaaatgaaggcacttgcctagcagctgaaaatgttgatatcttgaaaacaaagataaccatcactcctgattatatgattgttccttctctctcgtatgtttgcaattgttttctgtatagtacatgcatgtagaaattagagttggcagggagggcaagtttttcaaacctcagcttaaatgtggatgtattcttttgcctaccgaaatcctgccttgtgttaactatgaattaacctactttttcttaaaattgtggattccccagcccaaaaaagttagataatctgtttctcttaagatttcccaggaaataagattgaaatatggaatatctaatttcagtcattttaatgacaaacatatatggcatacacaagcaattagatcaactaatgaaattgaaatcattttctaaaaatcacttccctaccctcaaaaaaaaaaaccccaaacttgaattcactttagattttaacaatttagttgtcatatatttaaaaatgtttgatcgtttcccaaatttgtagtttaaaattccatatttatatttttaaccactagtctaagaggcactactgcataaaacctgtagaattcgaacagtttattctgtaggtttacttagacaacttttcatttgttcattattttgatgacacagtgatattttaagtacagttatatgctgcacaacatttcagttgatgatgaaccacatatatgacggtggacccataagatgatgatatcatatttttactgtaccttttctgtgttgagatacacacttatcattgtgtgacaaatgcctacagtattcagtacagtaacatgctgtacaggtttgtagcctaggagcaacaggctataccacacaaactagctgtgtagtgggctataccatctaggtttgtgtaagaacactctaggatgtttgtacaacaatgaaatcgcctaatggtgcatctgtcagaatgtattcctgtcattaggtgacacaagactgtaccattgccatgctatatttgctcattgcattacatcttgttattttttcacatttataattgcactgtgaacagaggagagggcaatgaaggaaattgtcttactgcctgggtcctgctttacttttcccctcagcaaccttcatccatccttcagatactcacagtaatttacaaaggaacagaggttcttctggagtaagacagaaaggcaatgtgaggtcaattgaaatctagatctaacagaacatgcttcttcctcttttgttgcctgacataattctacacattcatcaagccccagctcaagtgtcacttcctctgtgaagttttccttcttgttgctcccttagaattttggtttgtgtttactagtgaatcatcaatatccccttctgaattgtaacgtctcaagacctagggatctgtctcaactatctttctatcaccagtgtctggcgaagggtctgatatagagtaggtgccccaaaattcttactcaaagtactgattaaaagcagagtttgattgaagtaaatccacaaaaactcaatcaagcaaacatttaccgtgtacctactgtgtaccagggactaaaagagatatgaaagttgcaaggatggatatgatactgtttttcccttgagatttcctctgtctggcaaggagcacacacagtaaaaccatagttagagtgaaagagctgagttgtccatgagagcaagctcagaggaagggcatggcccctcaacatgagggccaggaaagcctacccagagaagaccaggagaggaattggaaatgatttatatttggagtgcactttaatatcaaagttcaaatttacaccatctccacttgttcagggtaaggctggaaagcaattgctgtaagagagcactgacatatgagacctgaagagggactctcaggttgtcctgtcggtcgttccagcctctgagtatgaggcgaggagggtggggacaagaggtgaatgtaagagagggacatcccaaaagtgattctcatttttttaccttggtcagaggcaggcttctggctgtccctctgattcaatattggctgctgtcttggctaggttaacgaatgttctagttagagaggcttctgccagccccaaatcatgtgctattcggaatgaaggggagggatgtgtagaaagaattctaaaacaaaaccatttttcctgtttttattctcacaacctgtaataagagtaaaatactctgagaccgtgtaacagaagaggaaggaaacatgtggtataaaatttgataaattgatcaagataattctagagtaggacttccgaatcatttaagtgcacatatgcccttaagattactgaaattttaaaactaatattgcatgacaaacatcttatgtttagggcattttagaatttaaagtttcacttgcatccttaaaatcattctacgcaacacaaggaaaatcggaatatttttaaatgagagtggaacatatttatatgagtacattttatttaatgaagaaagaggaactacaagtttcagtagtgctacacaactattttgctttctccattccaaatatttttccagttgccttaagtactaacctctgattgctgacatgtttttcctttcaaacagtaattcaggtatctattttgcatagaacagaagacccatgatcaaaaataacatttataatcttctgattttgagagcaaaatggttctgcatgttttcactacatactttgttttctgttgcatagattttctccacaaattcctgaattttcagaattaacaaattcaaatatttacaattatttttatattttatttttataatgtaagatcaaaaggaacttattcaagccaaaaatgaccaatacggaatcctttgaaaggatggattgattaatcaaaaattctatccaccttgcctcaatttcccacttaagctctcgaatctcccctgggcacttaaagcacactcctcttccaaatatagagtgcttgtaatgtctgtgtttcttacagctgaagactgcaggtgaaagtaatgaaaaatcaagttttttatgtttactttaagaaattaatgaaaaataattttatcatagctgccttattatcactacttaaattttattgagggtgtattatatgcaagacactttagcaggaaaagtatatcctctcattatccagaaatgctatctgctggccttccactatttttaaaaactattcttgttctttagctttgaaaaagttaaattgtcaatatttgaaaactctcagtggactatgtgagatcattcaaagataattgccacaggttgatatttaatggcatgagtttagttttaattctcaaatcttaaattcttagagagtcaagtatctaaaaactgctggttattaacaaaaagatggatgtttaccataatcattttctatagcattttctatagcacctgcctataaaagaacattctgcaatgctaaaacaatacatagattcatttaatcttgttgtcttcctcattttgataatgtacctgtaaacagagttgatttgctatatttggaataattcagataagttttgcccaaatataaggagtgaatgtgatgacctttaggttttttaggatgttttcctgacttcatgaattctcacatcaatgcattttattttctgcaccaaattatcgcagatgcatctactacgattcaccccacaatatgccccagctctagaggttgaaacattctttctaaacaatactctcctgatatcaggagaaatagagaaaaatagttcccgaatattggttctcctatttgcaaactatcaaataatgtccttccaattccaacagccttttagccttcagaggtttctttcattaaataatgttacttatgttatacagcccatttccttttttatcagagtcaggctgaaagttcatttttctgcaaaactgcagtgcccattcttaatttttgttttgagaaataactgttgtaccctctttattatcacaagattaataatatttctttattttattgctcctcttacatttggatcttttattatgagctgtcaaaaattcttttgggaagtagttggggtataaataataaatcgataaaagaattcatgattaaagacaagatagaatccattattctgttaacatatcagtagtgaataacaaaaggctacattgacaattagcatgcaatatattgctttatataattatacatccatatatttgccactttgatttttaattcactggtaaatttaggggatactcatttatggagttaatattaccaaaaagagtttttaaactgagcgaggctttaattagaatggtaaaatattgcttcagggcaacaatgagaatgtaacaagaaaactgactgatcagtcatgggtaactcgaatagcaaacaagtagagaagactcacaaaaccactgaaagttatatacacactcaagttgtgagtcattcaaactgggtattcatacacatgtatacaaatacaaacaagtgtgtgcgcacacaccctttccaatatacacacctgaatataaaactaaataagcagattcctctgttaacaattttattactctattttaggctggggctgaacttttgaagctgatgagcaaaatagtttcccataaaagataatttcatttgccaaaatgaaactactttccgttattaatgttgcaatgaaatggtttgaaatatgagtctgtgatctggacagaaaggatgctcctgttcccagctccaagagggagttctctaaacaattacacccacggagagcgctgtaaggttgtattttcatcaccggccagctgagctgtgtgcctgtcatactcccagtctcccctccagtgacagccgcattgacaacatgttatactccacattgattttacagttaaggagctgattgtgatatatagagattttaagaattcagctgagaggctgacttttgccttttatcattccattaaaattttataaccatctttttcatgtcatttcatccatgaattcttactttagaaagtgatagctactgctgtgagcataacttttctcatgttcagagctttttattgtattagcaaactaccccaattatagttattactcatgttttacataattgtggtggccctttcaaccatgcagttgcaggccagttgatttgtatatagaattagatgattcggcttatcattttaaagcactaaattgaaagagtgccaggagtcaggttttaacacttccctagccaaaggagctaattaagctgctttcagcttcctctccagaatcacacaagttaaaggacccttctgcaacaagagcagcgaatctactcagccagagcaggaagctaataaaatgtatgctggcttttaagggggaaacaaatcatgaaattgaaattgaacacctctcctttcccaagataagagatcatctttaagaaaaggctgtgtattgtgggggtttgaagtgcaagttcatctcattatcatggatgtttcacccataatactatcatcatatgcaggagaaataaaagccttatcccccaatcacagagaacaaactgcatcattgttgtttcttttccctgaagatgctcacagtttgatagttcacatatgaggaataattatgcaagacccagatgaaaaccctaataaaaaatattctgatttttaagtgtatattactctctttggggaagagagggtgagataaggttagacattaaagacttgaatctccaccattgattttacgaaacccaatctcaggggatttgggggtttttttagatttcaaaacaacattgatatcttacaagactcgtacttgcttttctctgggaaatagccaaatctagatgacaagcataaataagaaaggagctgtatccccattttgatataataattgctactgctactgtataccagagagcaaaagtaagaaatggcatagtggttttaagaaagctttaaaatgaaagctaacaagagactgaaacggaaagtgtgatttataccatgactgctggttttagggttttttttagggatttctcttcaaataggatacattaccaaattgtcagaaatagcttgatttcagagttagtgcactataacatcttttgcttcgaaaagtgattatgattctaccatcagtccagttggtgacaaatacgtggatcctgttgtgtgaaagtgtactcatataaccaactattattgcagtcactggccctgcaaagcagtggttgcatttaaaatttcaaccttctttgtaacactgaatcgcatacacacactcacaagatcaacgctgttttaaacaattactaaatccaagtatatcttttttaaagattttcaataaaatctaatgttcacagaaaaatctcataaatgtcaaaattgctgtgggcagaaaaggggggatacagtattttcttgatctgttttagcaatttatagatttcaggccgtggtttataagaatgctaaatgttctggaattacagctgttactgatcagtgattgagccagatttgtgttattgcaccatgttcttgcttgtacctagagagcagtaaagcctcaatataataaaaagcacctgcattttaaatgaaatttcaattgaaaaacttaacagcccttcaaattgcagaatttaacgcagcccagtaaagcttaaataacactttgcccccgcaggctgaggggtttgcattcaaggtgacttgattgtgtcgcatggtgaaattatttacaattaaggaatttctctggagggctgcagaatatttgctgttccacaacacctatgcaggcatatggtgggcctttttcagtattcatggagcctcctgaacctttatgataattgaatcagttagagtgctgagtggagcaagcataaaacctgttaacctaaaggtcagatctgtgcattgtttatttatcagtaggtgaaagagctaaatcggcagcttctgtcacagccacagtaaaaaatcgcctataatattaacagggagtagataaattgcaaaacatggattagaatgataaacagaaccaagtataatatagaatatataatgagagatgctgaaggattttactgggctgtaaaatatgcaagtttgttatgatagtgttattgattataattagttactggggctctagaaaaaaatgtaggggaagctagaactttagtaacaactaccctcttgtatgtttattaaatttatttttttaaatcctcattttttaaccaatggcttgaataaaaagacatgattttgataaagctgtcttagagaggaaaatgatcattttagtttcataatattcaacaagtatttcacacgcaaaatttatgagcaaagcaatcacagtccttgtctttatggcacttatttatttacttattggcctttaccaagtgttcattttcatatccttgtagcagagctatcactcattttagctttgaggagaggtgggacatttccaagaggtctgactttctggatttattttactttacagaacctggacctgtagttcctccgattcttctggatgtgaagtcaagaatgatgttggtcacctggcagcatcctagaaaatccaatggggttattacccattataacatttatctacatggccgtctatacttgagaactcctggaaatgtcactaattgcacagtgatgcatttacacccatacactgcctataagtttcaggtagaagcctgcacttcaaaaggatgttccctttcaccagagtcccagactgtatggacactcccaggggcaccggaagggatcccaagtccagagctgttctctgatactccaacatctgtgattatatcttggcaaccccctacccaccccaatggcttggtggagaatttcacaattgagagaagagtcaaaggaaaggaagaagttactaccctggtgactctcccgaggagtcattccatgaggtttattgacaagacttctgctcttagcccatggacaaaatatgaatatcgggtactgatgagcactcttcatggaggcacaaacagcagtgcttgggtagaagttaccacaagaccctcacgacctgctggggtgcagccacctgtggtgacagtgctggaacccgatgcagtccaggtaagatactgactattctctctcctttgcagacttaggaatgtaccctggattgactctgtgttgaacagagccatctactgactaaacaaacgcatttgttgttttaggcattcactggagaaactgggttttggcctttggcccaaactatcttaaattcgatgtcagtttttcatttatccctgtatccccttaattatattgttgagatgcttccatttgcctcgcacacctgaaatattttgaatgccacaatgatgcttagcttaaccaccacgtcagatttaaatagatcagaaaatgagaagagatgggaaaataaggaggaatgaattagcatattaacaaaattttccattaccaatagtctggtattttttaataatcaaagaatcaaagtaatggggaaagaaataaaaatagcatattaacgggctatccagaaagtgttcaattattcacctcattctattgggaatgaactctagtggacaggataactaccattgttttggctggcatacaaacttcattcaagggaaattagtgtaaccaaacaggagggagttttgtagcttagaagcctcttttgtgtaaatacacacaggcttccatggattcagtcttgtactactgccaaaagcattggtacagtagcttgctcaccggagcacaaaacaaaggacatttgcataacagcaaagttcatctgctgaaattattacttggatctatgttgtgtgttctctctcccccaccaaaagcaaacactaggtgatgctaaacagtgtaaattgttggagaaatttaatttaacctacaaattaaaagctatttttaaaagtctttgttagttttaatatgaagctggtcaaagcaacacacatttttgatataaatatgtgtatagaattccattcattaaacactaatgggaaattaattttaagtacacgatatacgatgtttattgtatgaactgagcaatgtaaagaattgctcttgattcaaaataaaaacaaaaccaaaaacaaaacccaagcatagagttaataatcattccagaaatgactttttttttcaatcttgggggagttttgtaaaactttggtagcagtaccaatcactatgatgcaacaaaacaaacacagtctctttacaaaggcaacactacataatggacattgttctggattatttcgaataaaaatcttataactaggcgttactgattgtggccgatctgaaaaagagtaagtattttcaggccgggtgcggtggctcacgcctgtaatcccagtactttgggaggccgaggcaggcagatcatgaggtcaggagatcgagaccatcctggccaacacagtgaaaccccgtctctactaaaaatacaaaaaattagccaggcttggtggcgggcacctatagtcccagctactcgggaggctgaggcaggagaatggcgtgaacctgggaggcggagcttgcagtgagccgagattatgccactgcactccagcctgggcgacagagcgagactccatctcaaaagaaaaaaaaaataagtattttcagaggaggaactcagtgtacaattctgcttgattcagcatatataaacaataattaaaagtatcagcttgcctggctttttcttcacatttttaccctcttttgattttgtaatatcatccatgaattaaacaatatacatggcttgtcagcctgctagagaagtttagattagcgtggctagaaagctgaatctcataggcactcacctgaggccacaaggcattggtaaccccaagtcaggaatctcaatgtctctaagaaggtgtctgaaatatatgaacatggtacactagtaatattctaaaaattcacactttttattctcatcttataactaggaaataaaaagttatcaatagaatcagcaggaatattcaactgagtctagtatttaatgctatatactatttaaagagtattaagataacatatctgtccttcagtattattggctcacatgttcagaacgatcttaagactttaccgaagtggacgttctcgtgatatagcttagctggtaaacagaggtatatgacagctaaacaacgacttctctttgtaaaatatgagatttaaaagtccaaattgcaaatagaaaatattttatatgaaataacagaaggatagtcattaatgcattggttaagaaattaattcaactatttatcatagagggttgttccaggtattaggatggatgaaggaaattgacagtaatattaacagcagtaacaataataatttcagttctattgacatttacggaacatcagtacatgagtgaacatctttgtaagtgcctcttttaggcagtagggacacagaagagatcaagatgaagtccctaggctcatggcgattacattttagacagaatgcaaacaaataactatgtaatatacctggaagtaataaggacttgggggagaagaacaaattgagtgtagagaaatatggaatgccagctgatagggtgggggataatacaaggagcagagttggtatttcaccttagtgttactcattttgtgcaatgtggtttttttctccatacaatgccacctgtaagaattacagtccaatagggaaatcaagagagacaacacatacttaggctaactagaaaataaatgcaatgtaacatattagtaagtactaaaagaggtgatatgacttggtataaatatgagccttgagaaaggcaaattggagagcacagcagcatagatgaaataatatgcttaaaatcttatttgattacaagaaaaataaatatataatgtcaaagagttgtgtcacctgaataagtgaaagccatgcacttttatttaatatttaatcacctaagaaaatgtatttcattttataaggttggtaaaaatgctctaccaagacctaaaacagttcaatgaaactatagactaatttcatttatgagtacagattcaaaatttctaaataaaagattaccaaattgaattaagcagtatattaaaagaatgatatacaaggacaaattgatttcattttaaaaatgtaaggatggttcaacatcaaaaaatctatcaacatatgtcttacatcaaccaattaaagtagaaagcccatatggtttttttttatcaatagatgcagaaaaaaaggcatacaattaagaagttatttctaacaaaaagtcaaagtaaaatcagattaggaagaaggtacttaaatgggataaagtcaatgtataaactgctgtactgaagccttgaattgaggattgataagaaataacatgtataaataactaagttgcatgactatgatgcaccaaaaaaaagaaaaaaaaaacttcttttatgataacatcatgagcctgtaaaccttgatgcccctgtccactttttcacaggtgaagcagaataaaatagagtaatcctgcagctgtcagctcctcttatacagtagggtcctcactcagctcagacaggtgaagccaccagccttggcaggtgcgccacaaggaacagtgtcacccagaccacaaacatgtgtagcttccttccctctgctatgtacacttagggtcactcatttatgggtttgataataaagcaaagtaaaagaagttgagtcttaatcatcatcctcattgacttttaaagatgggccaatgtttgatgtctacttaaaataaaccacagacaaaaagtataaaacagaggaaataaaataataatgaaaatatattcactgagttcatgttatgttctagaaattgctttcatttaattcttactacaactgtgtcagatagatgctattgtcattcccattttacagacaggaaaactgagaatgagggattaagtaatctgcataagattacataaggagtaagagttggaattcacacccaggcaatagggttctggagcctatgttcttctctacttctttacactgcaacaaatggaaaaaaagtgcaatcttcctggatggaaggacttaactccataacaagacaatccttccaaagtcaacatataaactgaacatcattcaaatcagaatgccgatgttttttgtttgttttatttcaaactggataaaataattttttattttttattttactttaagttctgggatacatgtacagaacgtgcaggtttcttacataggtatacatgtgccatggtgatttgttgcacctatcaaaccctcatctaggttttaagccctgcatgcattagttatttgtcctaatgctctccctcccgttaccctccaccccttgacaggccccagtgtgtgatgttcccctccctgtgtccatgtgttctcattgttcaactcccacttacgagtgggaacatgtggtgtttggaacatgaggtgtttggttttctgttcctgtgttagtttactgagaatgatggcttcaaggatgaagctggataaaatgattttgaagtataaatagaagactaaatgattgaaaatattatagaaaattgtggaagaataatgaggtggtactttctgtagtatgtaaacttactttaaagccattgagttataataatatggtattggcatgaaaaagacaaatggtcattggaaccaactagagagtttaggtatagataacgagtatttgttgaaatgacttattgtaggtagaatctgcattttatttcattggtaaagaatggtttgctttaaaaaatgataccagcccgaccaactatcaatgtgtacggaaaaaacagatccctttatcatatcatattataaataaattcccataaattaaaaatgttaatgttaaaaaagtaaaaatcttagaaaaaaaggagaatttcatgtaatctaaatgtaggggagcactttctaaagaaaaaaagaaactcagtagcttaaaaaaaaaagatagctatatgtagctagaaacaatctgattgattttctaaggcataaacttcccccccacccaccaaaaaaagttaacatccaaaagatagatctggaaagtacatctgtaacacatactacagacaaatcaatttcaccttaatatgcataggccttctaataatttataatacaagatactttaatagaaaataatttaggtaagaggatatattaggttggtgcaaaagtaattacggtttttaccattaaaaataatgacaaaaaccacaattaatttttcattcatacctcacataaagtcaagggagtgaaaattaattaaagaaacaagtaatattagcaaaaacgaatatcagtaatttcaagagtttgtggaggcacagatcacggataatttcattgtttatgataaagtgaatttccccaactttttaagaaagtagtatatcaataatgattaaaattaaacatgcattttccttttggcatggcaatacttggtaatctttccaatatgaaataaacacaagagcacatattgcatacattttcaaattttatttttagcataaaataatgtcagtaggattaacaaataatttgttttcaaccatgaaaggaatattatgcaaccataaaaaataatagggtgtgtccataatcaattaagtctgaaaagcaagttccagcataagtggtagagaactttttttctgtgaaaagtttttaaaaaataaaagagaaagagagagagacctaggatatgcaggagtatatttgctttgcttgtacgagcatacaaaaagtatggaagaataaacttcagactattaagttttcacctgagtgaaataaaacagagccacaattaatgtttcttgtatttatatatttgtactctttctctgtctgattgaaaaaatacaaatagaatatttgaaattaaaaattaagattaatatttttaaaggaaaggaagacattgtgaaagacaactttatttcaacaaatatttattgcacatcttgttctgtatgaatttttcaggggagtccatcataagaggaattactacactgtacggagtcaaatattcccacatgatctttctttatggtacatttttatcttctattgacaaaatactcttagaattatgcaatcttatgtctacacacgatggcaaggattgtctcatcacattagacatgagggttccgaggcctggagatgttaaatgttttgcctaaagccacaccgctttgagacatttatcatctcttagtccattcttaacccatatatcaatctttataaatgctcttattcatgaagttcttcaaaatagtttgatggagttaaagaagtgaggaagttgcttactatgcttttgggtgttactcttttcaagcctgaagccaatcaactaacctgcatgtctaagtttctgcttaaaatggggaactttgaaggtgccatgattctttttagagagacttttcagggatgtaaaagagctgctgaaagtcaatcgttccttaaacacttaaccggcaatttagccgtcctattttctgaagacttacaataaacagaaaaaatggaaacctgaatcattaagaaccactcaaataaaagaagtcattgtgataggaaagccatctctgaaataaacattttatttccagtgcaaaactataattctatttaaaagttttaatgtaatattattgttttaaagaacacatttcttgcttattcaggccaataacatgttcttttgtctgaatttttagggatgcaacaatatttcataatctttcttatgtacaatggatatacaaaaggtcataggaaattaaacaaactgaaagttttaatctcatatattttgaccacatatacaataataaatgtggtcttaagcatagaaaagaatagaatacaatatttagttaactggctccttaaaattcttggacatgggcagggcgtggtggctcatgcccgtaatcccagtattttgggaggcaaaggcaggtggatcacctgaggtcaggagttcgagaccagcctggccaacatggcagaacccctctctactaaaactacaaaaattagccgggtgtggtagcacacgcgtatactcctagccactcagggggctgaagcaggagaatcgctcgaacccagaaggcagaggttgcagtgggctgaaatcgcaccgctgcactccaggctgggtgacagagtgagacgctgtcttaaaaaaaaagaaaaaacttgaacacattgattaattgattgattgattgattgagatggagtttcactcttgttgcccaggctggagttcaatggtgcaatctctgctcagtgcagcctccgcctccctggttcaagcaactctcctgcctcagcctcccaggtagctgggattacaggcacctgctaccacacccaggtgatttttggtatttttataccttatacaaacattaattcaagatggattaaagacttaaatgttagacctataaccataaaaaccctagaagaaaacctaggcaataccattcaggacataggcatgggcaaggactaagtattaatggtttaaagtgttgccaagctctgacctgaactctcaaagtattctggtctaagaggcaagaaagccgtattcttcagattagtcaggttgaatttagctgtgatagctcttctttttttcatttctgttacaaataccaggaagctctctgagtttgaccttgactcattttccgggtccacagacagcattgcacctccaaaacaaatagcgtcctatatctgtgctacaacctttgctagttttagggtgtttttaaaaatattccccacatccaggcaaatcctctatgtttataaggaacacatctaaaacttctcttcatcccagcctctcttcttagaactctccaaaaagtttttttaagattcacaatgatttcatcccctgtagtataatttggtagatattggcccattgttaattataaattaccaaagtaatcatcaagcaattgtccaactagcatgtggtgagagcccttttgtcaccaattattagtaagaatactctttaaaaaatctcaggtcatagtcttcctggatgaaaccttctccctttgatttaagatagaaaattatggtcagtccttctccattttaatttctatattgctcctctttggtttgcataggggtacaaatgtacatataaatatgtcaccttgtagaaacctgtctcttaaagtttcaaaataactgtatgctagggaaaaaaatataatctaacaaaacatgactctaattactaactgaactccacctctgtgcacatggtactaagtgaatgtagagtttatccctgctatgaagaagcttacaggctgggacatgagatatatatcctggcatttatataaagagcactagaaggtaccaataaaagagatgaaagaggataacatgtaaataaatgatttttgtcatggcctgtgcacattttttaggatctctttccccataagaacatgagtgtgttaccactatgctcctgtagagtttagccagaaaagaaaataaacttcagacattctagaattctactacaaaatgttgttctttcttctgatgctcaagtccacatgttagctaagcacaaacatctttggcttccctttttcaaagctttctatacattccttatccctgagaagaggatgtgctattaatgctttaattgctaagttatatataaataagattcaggaactcaattttgcatcttcggaaaatatgaataatgatttctctttcccttcctccaagaaaaagtgacttatttggcagtcacactaacagtgcaaagaaatgagttctgatgtttcatttagttgagttataaacatgaaaaccatcaaatcctatgcaaccctattgaagcatgtggatgtgtgaattttctccatgtgtttgctctgtgtccttcagaacacccacagtggcgatgaatcgctaaggtgtgtatcagtctgacagtcgtagaaagtggcaagactgaaagccaaacccaggaaacagcatttcatttagctcctggagtactgctaattgatctcaaacccttcattactgtctagtccaaaggcctcaggagaatgtagccatttagaaaatgacttaactgaaaacaagagcaaaattctaggcctcgtgaacttcaattgctctattcctgtatcgtcacactgattctaagtttatctttcatttcaggtcacttggaaacccccactcatccagaacggagacatacttagctatgagattcacatgcctgaccctcacatcactttaaccaatgtgacttccgcagtgttaagtcaaaaagttactcatctgattcctttcactaattattctgtcaccattgttgcttgctcagggggtaatgggtaccttggagggtgcacagagagtttacctacctatgttaccactcaccccaccgtacctcagaatgttggcccattgtctgtgattccactaagtgaatcatatgttgtgatttcttggcaaccaccatccaagccaaatggacctaatttgaggtaagagaaggtgactatgatttttatgttgctgtagtccttatctctctgagaagtagggaaatgaaggaggcttttattcctatatgaacatagaactaatttggcattgaatatcccctgactcataactttcatacactatcatactgtacacttcaacttattatggaaacatcaaagtttatcaatttgaagaactaaaaacccttgaaaccacaatcactattgtctaaggattcgctacataatccatcacttcattttcaacatatgcttttattatatgttaggcaaacctgatgtaggttctatatgatacatttgcacaaatgtacctcagaattctaaggctaacacagtaattctttggcatgttgttagcttatggaaacttgtgaggagtgtggtcagggagcccgatacgatgaaagaaaagagctgtgattcagaaatggttttgcaaccacccaaacttgatacttggccaagaatacaaagttgataatattatcatcgtttataaagtattgatagtcataggaaaccattaacttgataagctttgtgtatttctactttgtgcgaaactggcagtaaagatttggcacatctaacttagaagaaatctaaaatgctatcattctgggagataatagtaaaatgcgaatgtaactgattcttcaaaatattaaatatatggaatttggtccagaaaaaaaaacgttcatctgaaacaaaaccacgtaactgtaaacttaagatgttattctttatgcttccacgcatatatcacacgcacatgccacagaacagcctgagttttggtaatctcaatatgagttgagataatcctgatgttcctgcttgtcttttgctttagatatgagcttctgagacgtaaaatccagcagccacttgcatcaaatcccccagaagatttaaatcggtggcacaatatttattcaggaactcagtggctttatgaagataagggtcttagcaggtgagattacaaaaactataaaaacaaatgctggcatttagttctgggcatgttgaatagttcaaagtatctcagtgtcttcattgtgtgagcgtgttatcagttatgcaataaaacatgtttggttattatctgtggcattaatcacccagctgtaacagtcagcatgtttaatgttttccatcttaactgcatgcttaaaataagccttttgaagttgaacttgtagatgttcaagccttaacctattgcctttgtcacggctccatctagacataaaacgttatggaagaatttggaaatattgaacacatacaaaatggggaaaattcctgggcacttgtagaatgcttgctatttctagaaatggcttataaatgaattataatgacttataattgattgtaagttattgattcagtccgcaaaagaaaacattagtgaacaggattgggacttgaaagaattcaatctagagttcaaagacattcagtaaaggctaataggtgacagtagaaaagggtgctacatgggagagttaggagatctggttctgctttagcctgtgctggagaactagctttgtgactttaggccacaaagcttcactacttaaaaatcacttaacttctctgggcttcatttttgttgtccataaaatgaggtgattttatagaattaaatgacttctaaatcttcatgagttcaagcaatgtgattaaatttcagaaaacatgaacgttattttatgaaaactcctcgatcatatgtttcagtaacttttctatgtgggtcattatttttctagacccaccactgggtagctgtagtctgaaccctgtttaccattctagccttgtctcccatccctttcttaccaaggcctctgcattccagccacatttgtattgcattcagtacctccaacatacaacacttgctctttcagcttttccccatagttgccttttcctgttgcctgactagatcatctgccacgtcttagcctggaggtttcttcctctaggaggcctttcctgccaacactcttgctggtctgattcagctcctctgtaacatttccataggacatcccctaacatatcactattgtcattgtagtgtactggcctgactgcttgtctaaacaccacgttatattatcagatctaccataaggcaggggtgcggtcttcgtgactctgtcttcagttcctagcatggtgtctggcacataccagcacatagtgccctacacctgaatacttaaaaataggttagctcaatcaagaattaattcactgctctgtaccttaggaatattagctgtagtgttcttctctctggggaatggcaaaactaaggaaaattctcctgtcctcttaaaaagttgtggtgggaaaacatcctagttcttgtaagattctcagagagaggcatctcgtaaatctgatcaagcaacagaatgaactatatgaaactgccacttttataggtgaagattggtcaattactagcagatccatgttgcttatcctaaattataatgctcattatactattctcaactacttttaattcattatttacttaatttggcatccctatatgattatcacttcagtagaataaattcatttatttttgcttatttgtgcttactgtgtgctgaggcactgtgataaggaacaaaagataaatacatcttagcccttgacctcaaagaacttataatctagtggaggaacccttccccccgccccctccatagagagtgtgatataatatgtatttttatatattatatacattattaattatatataataatcaatatatattatatatttatatattgattattatatataattaataatatatataattaatatatatattaattgctgtcctcagagttatctacaaagtcaccaattctgcctaaagaaatcacttcaaatagtagcttcctgtgacctatgaactcttaagtgcttaaatataactatttcaaaaaataaatagaacttgactctttaacattactgaatctgagttttagccatgagctactcagcaaaaacaaagaataagtttccaaaagttaattttgtttctttatacaagaaatgaaaacttattaaataattaggaccaaggccatgaagttagttatgaatttttagtgattcctctaaggattcttaatgagaagttcaaatctaagatttcaggaaaaaataaagtgaatttccacaacttaaattgaaacatgaattgacataaacacacccatgacagctgcttccggaagggaagtgtgcagataacaaaattgtgttaaagggatattttgactagtttcataatgccaaatgtcatttttttccggtagtacttgcacagattttttttatttattaaaataacagctacaacttacattaagcttgtagaaaaaaaaaaagcatttcttcttaacattcagtgtaaatggcgtgagtctttataagaatctctttttctagccctctaccctttataagtccataaaaagctaggagtgcctttagcccaagggggagtgtcttgcaaatatgagagaaaaccaaaacttgatcccctggcgggcaggatatttttctctttaaaggaagtgattttgtttggttagatggtgccactggccaccttggcaacatccggggctccttgttcctgctggtcagctagtggtctgtcaaattgcagagggggatgaagctgagtgttcatcatgtgttggttcacccctgtgttactgttccttcatggcccttcctttgcctatatttgttttgctgatttatttgtttggccaggtatgttttcctgggtttttaattgaattctaatatctttgggaggattatgtaatttcctattctccccagattccaccatcccaatttccttcttaacttaacgtctgcataaataaaaggagcactgaagtgtttcttaccatcttgacttgaatatcaccatagttacatttagaatcagcttttaaatggcacttctcctgatataaaaagtaaaattaagattcactagacatctctttatgaatatatttgtgacagtaaatataagttgaagccaatttcctagttcaagtggtctattttggctaagtatgtgtttataacgcatagaaaagcaccaatttaatttaaaacatcattatatttggaacttcagatcattctagtagttattttttcttttatatctacatgtacaaaacagtctcaagtcaattatccagataatttaattctaacaaaaatactttttgctcttatgattatcttaggtaaggagtaatttttgtctaaattgcacagctagttgcctcattatcgaattttgctctgcctgtgtagacacgaattccgtataactacaggtttatactgcttgtcagtttctaacttttcttccttaataattccttgcaaagtgagcaagttatggttgttgggggaactataactttgggtttcctgacattttcatcacttagaaaatctggcgaacgtgctgttatcatctgaagctgccgaagtgagtcaggcagggtttaacaagagggcggcgacctccttcattttaagcatcaatctaccttcacaattttcagcacctaacaacactgccttggttcctaagtgatcagataaaactgctaagaatacaatgagcatgttctccttttcgttgtggatttaaagaagaacaagttataataaacaatagggttattttactattatagagaaaatattgactgtcagattataatttagatttataaattagctttcattaagtttatgaaggaatgtatgttctaattgctattccttttaattatttatacatttctcagagtatttttttttttttttgcaatgacaatttggatggagacctctatgtgattcctcgagaatccactaattgtattacatttaaattaaaacattcaaaattaacacattttcgtcttatttttcaaagaagggtaagacttaagatgtaaatgcttaagctaaatatatcataaattctaagtttaaatcttattgacatatattttcatatatatttttaaatctactaaaataaagatgtttcaagtcctaaaagaggatgccatttctgtgggggataatattcaaaagaacataacttttgttcctcttctttgtaatgagattaaatatgtatagatgacatctgcatctttgctagtatgaaagactgggtcagttccatgacacgtgtttctataatataaataatgtcagattgtagctattaagtgaagaagttaactttgtacatagaaagggcaagtgaaaggaaagcttctcccgtgactaccaagatgagatagatcctgttaatttattccttaatatgggaatgtgaataaaaattgagtctaagaatgaaagccaacttctgtcaacactagtatgccatctcatagccatgcacttaattcaaaaggagtaaacatgtctttcacattcaaattaaattggtcacagtgttttttcccattggatttttttttcaatgccttacatgccctacacgatgtccttttctgtgtcatcatattatgtgttacctccttgtattagcccattttgcaatgctctaaagaaacacctgagactggataatttataaagaaaagtttacttggctcatggttctgcaggctgtacaagaagcctggtgccagcgtcttcctctggtgaaggcttcagggagcttttacccgtggtggaaggtgaaaagggagcaggtatgtcacatggcaagagagggagcaagagggcgctgggaggaatgccatgctcttaaacaaccagctctcccctgagctaatattgtgagggctcactcactaccacagggatgacagcaagccattcataagggattcacccctatgatccaagcacatcccattagggcctacattcaacattggtgatcacatttcaacataagatttggaggggacaaatatccaaactatatcactcatgaaaaatgaacttctaaatccagaaggatgtgttttgtcacaggaggtttttttcccctagtgttttcttagaataaaaaagcagaaaaactactttcattggctgtatttctttctcatggtgatgacaaagtagaacaaagatggaaattactgcaaaattatcttaggtctgacaattctggtagtgtagatatagatagcaacagaaacataacagcttcaagtttcactcacaatctaaaatgtctcatattaaaaatattcaagtgtgatcaacattactcttcaatttttgaagcaaaaatcttcaatactatttttagaatcaacaaatagattttttaaagtgtctaccatcagctgaaaattttaatagctatagacttaagcaatggaaacaatattgcatttcatttttctttgtttgctattcccacaaaagatttgaagatgtaaggaaaagtatgatttatgagatttctcaaatccacacttgtgtgatggtgtactgaaaaatactttgggttgtggcagagatgaggaagagttagtggaagaagcaactaaataacctgcattttcagaagcgtgatttatattggtgacaatattaacacatgaattctgttaggacatcaataaagttgacacatttttaattctgatgaaaataaccccaggcattctgcagctgccctgaagaattttggtttcccacaatatatcagtcccttccaagatacaagccttcacatattttgccctggacaaatgtcttcactggataaaataccacttcttatcaaaacctgccccaaatgttacctcctccgtgaagacttcccagctggatatggttaaattagatgcttcatctgatgcgtgttcaaagaataaggaataaatgaataaattagatgttctcatttaaaaacatatttctgtaaaattttatatacattatggctccaggtggacagataacaattttattatttttaacacctggcatattggtaatatccaataaatattaaatgaatgaacaaatgaatgagtgaagtgatgtattaaatatgaaaaagcaatataatttgttttcaatatatttttaaaagcactttgctaagtttcagcagagatattctttctattggacaggtagatttttatctcactaacctaaaaaattatataagtgacctgaaatttttgagactgagtgcttaaataactatgaaacatctattcattcatttataaaattatctattcagtaaataaacaaattaaaactgcatcatttaaacataatctagttttctaattcattggagtaataacacctgaaccttgaaatgaatattgttccacaagtaagattttaacacatattattttttatgaggaaaattaccatagtcatgtctataccataataaagtttacaatttgctgtttggggagtggaggagggagagaccggaggatggtctcaagcaaatgggggaaaaactattgtaatagtccaagtattcctaaatggacccaaaaacaattggttttactggctacatcatagactcaatataagtattcacttactttgaatacttatattgcaaaagttttttcctacagagtttaaaatggacatttttcaagacatgcctagagaacacactttgtatttagagaagaaattgattgatacacataagttttgtcataagtatatgatgttaattgatctagcatttttgttttaaaatgtattcttttatcatttattaaatggaatgtcccatttaatatcaacaatcaacacgtaagtccatttgaaaaacagtatacatagagtgaatggaaaaccacttcaagccaactaatacattctttttttgatatgaagtggtgaaatgtgaatcaacatatatatgtagacaagccataggtatatattcttactaaatacagattggaattcagatgaaatgaaaacagtatattttagtatttaagaggattcaggatcttgtttcctcggccaggcgcggtgactcacgcctgtacagaatcccagcagtgggaggccgaggtgggtggatcatgaggtcagaagatcgagaccatcctggctaacacgatgaaaccccgtctctactaaaaaaaaaaaaaaaaaagctaggagtggtggctgacacctgtagtcccagttactctcaaggctgaggcaggagaatggcgtgaacccgggaggcggagtttgcagtgagctgagatcgcgccactgcactccagcctgggcacagagcgagactccgtctcaaaaaaataaataaataaaaaaaaaataaaaaataaaaaaaaaatcttgtttccttaaaaatttaacttaacaatgaaagttaaagtacaaaagacaaatgtacggcctcaaatgaaatatctactgatttctcaattaaatttttaaaaagtggaaatagtgtaatattggaaatgaataaaccctatgtccagctaccccattaactagttgtgcaaacttacacaaatccacttgtttctcagggtctcagggttttttgtttaatctgtatgatgtagcacacactttattatttgtagcagataaactctaaagccatctcttactctaaaattttagaaccaccttgaaaacaggcatgcaattgtgtgtatctatgtggcctgagttttgtagacgtaaattgtgtatttcgccataactaaattattgtgaaatctcttaaagtattataaaaactaaagccctatagaatttatttacaatcaaccattttagcgccacctgatattgttaattccacatgtaggaaagaaccacaaacatggtatcactttaaatccataaagattattaattgtataatagcatagacatgtggaagaaaaatttacatattataggagaggaggctaggtatccagactctagctacatttcttttaagtcattttatgaagtaaaatataattataagtattttacccagggagagagctaatgaagccaaggtcgctggttcaattcccttgtgagccattagcttcatttcattccattgtcataggcttgctaccctcttaaccccgactcatcatccttcatattcatactattggttgcaaaggaaatttggccagactgtttgaatgtgtaagcaaaaatctattccctctgctagaaaaataacgcaaagttcaagccttagtgatatgacatcatccaagtatggacagaacagattatcattatgattgttattattactattattattatcatcactattatgttggcagtatagcatcatggttaaaagagcaggctctgaaatcagactgcctatatttgaatctcagtcctcctacttattatctcaatgacttggacaagttatttatctctctgagccttgtttttcttattttcaaaataggtattataatagcaccttatagagttttgtgaggaatgaatgggttaacatctgtagaaaatgcctgacagctattaagtaactattattattttttagttgtctggattatgtggactattcagcacttgctaaaaagcatatgtattcattttccagggctgcagtaacaaaatatcacatactgggtggcttgaaacaacagaaatttattctctcacaggtctggatataagaagttgcaaaccagtttgtattctggaccagactcccttccaaagctctgtagaagaaccctttcttgcctcttccaacttctggtagccctaggaaatccttggcttgtgacagcataactccaatttctgtttctgtttttacatggccatcacctccctgtgtgtatccatgtgtctataaaatttctctctcttttttcttccaaagacatcagcattgaatttatggtgctgcctaatccagtatgacctcatcttaacttgattacatctgcaaaaaccctatcttccaataaggtcgtgttcacagggaccaggggcttgggcttgaaaatatctttttgaaagatacagttcaacccactacagcagacaaagcagaaataaaagaggcattaaacacctgagaagagatggtaaagcagggaggtgtagaagatctgatgcaagcacatatttaggagaaatagataaatagcctcaaaaagtcactaagttttacctgtaattacaatagagcaacacctttcaatgtgggtcaggcagaaacctgcaaacgtatcttcgggctatgaataagaaacaggatgagtcaagcagatttcttctacctaggtggcagtaaaatgctctgaggatcctgatataattttggtcaaattatttaacacaatcctgcaaatggcacctacccacccatgccacaccacctttgcatcgtcaaatcagagattgtgacatattgagacaaatactgtgggccttacactggagatgaggtatccttgatcatctaataaacccaaattaggtaatgatctgaggccagtgtttgccctgtgtcctggatgcctctgggatggtcgtgtgttgcactacatgtttaagcaagtatctcagtctaagctattgtccactcatagactgactgtgtctgtttatggcatttccttacacaggtagttctgaaccaagcaaaggaagcctgatggtcttctgcccaaaactggttaaaaaaaaatggtggctttactctatagtcaatttaataaatgacttggaaagtcctcctcatatcacatcagcatgtcagtttttgccttctgcaaagtaatattcggtttccactgtattgactcaagtaaatatgttcacactatggcaaaatacagctcactgtagcaaaactctcagcgggagaatgttgtacactttggtcacagttacaatttaatttaggggtttatctgtctgcagtgagattatgggaaagaagcataggtatcggaagaaaatgttgatgagggattctgatatttgaaaatggatgagtttccaaaaagaagagcataaaactctctggatcaaattcagatagaaagctggcaggttgcctgatttgtaattgcatcttgaattgagctgtaatcctcaccacttctgaaaacaataagaataagaaaatgataaaccacatttgttttcaatagcaatatttgttcagcattcctaataaaatatttccctgatgttttggtttatgctggcaagtcacaaaattaatgatatgtgttgtgtaaggagggaaaataaaataatgtattttctagggaggaaaagaaaacagtattttgtagaggggtggaaggaaatcctgtattttgtgaagaaaaaaagaaattatttgttagattttctgtaaagtagaaattcatatactttttttaacaaaacaacattttaggtttacaacctatgaatatatgctcttcgtacacaacagtgtgggttttacaccgagccgagaagtgactgtgacaacgttagctggtcttccagagagaggagccaatctcactgcgagtgtccttaaccacacagccatcgacgtgaggtgggctaaaccaagtaagtaagcttctcatacctgtgttaacactttgtgtatttttaaaagcatattctttctttactatgaacctcccccatgtacacatcattttgatagtgaagtgttactggtaaatttttaccaattgcagattgacagggctgtcattgaaaactttagaagggccatttttattagtacccaaataaattagaaatggacacattaaaactaaaaccctggggcccctgtgccattcttaagatgcaaactctctcctactttgacattgttcttgggcctcctgctctccctctgtcatttcctttgcatgaacaacgtaatttctatcataccaggcaattgtgatagacatgtccatgtattaattggatacaatgtactattgttcaccttccttcagagagctctgccctaatatcttgtaactcgtcgctcattagcaagaaccatttaattggattgcaataatggaacagattcttcccagtggatcatcttcagactggctatgggcagaattccagcttgatccagtaaaaggaagcctagacatcaccactggatccacttaaataatgcagggtcgaccctggacctgctgggaacacttttttaacaggcatttggaagagttcacagagtaatctaatctgttcctgcaacgttagaaaccacagtaactgaaatttcacagttacttggtcagtagggtagtattaacatgttaatttgttgtgatctgttaatttgtgtcaatccctgacgactatcaggaaaaaaaccctgaatctaccatgagaatatgtattaaaatcagtcttataggtataacttgagatctggcaaatagtttcatcaaaacttgtcagaataacaccaaatattgagaaatacctgatcaggaaagacccactcaaaacattttatttatgaaagaacactctgctcactggggtaatcatctattgatgatataaaaagatgaaaagtcactactggttgggcaatgtaaccatgtgattttggttacactggatcagccttgaatttggttacagcttaagaagagagatgctccatttaggacacctgagtgatatcaattgtgaattaaagccagaattgaggatatcaattgtgaattaaagccagaattgaggatatcaattataaattaaatcagtaggttaggtttatctgtgtttccacaaaataatccatctttacaaaagaaaactgtctttctctggtttttataaggctgcaggtttctaatgatctgtgacacttgtattgggatctcttaaaccattttaatggaataatataagttaattgatgcttatggctaccctctgaaacacctctgggaaaaatacaaagtttttatctggggatgtgttttaaggcatatttccattcatctccctcttgctctctactccacctcactaactgattcatcttaaaagcctactcataaaggtaggctctcccccctcatctgacatttgaatacttctgttaagatccggctggtgaatttccaccaatataggtcctttatgttataattgcattcctgaagtaactgtgcttataaaaactgacaaacctaatagatctgaagcagctcactgaagtttcattaccttggtaatctgaacctctgaccttcgggatgtaggtaatgcaatctgctgttatttccattcataccttggaaatttttcagataactatttgtgagcacaaaggttaactctcagaagagggtcagtcttgcgaaagcttgttgcattatcattttcttcttttgggcaacttgctatcttaagtaaattaactagtcgatcctctgtgaaaggtggcctattttttgcaattttaattttaaattgttgtcttgattggataggaaaaacatggcatacagtctaatatgctcaaaggcaacaaactatagattgaaaatactttgcagtggaaaatcatgttttaaatttataaatatttgcttattaaaaatcaccttccaatgtatatatatatattttaaagcatggtctttgtctattatgaccctccccatgtacacatcattttggtagcaaaatgtttctggtaaatttttatcaatcacagattgatatgtataagttattaaaaacttttgaagggccagttttaaacattagtatcacatacatgatatgtgagataaaagcgtccctgtgttacttcagttcatttttggaaggcagatgttgcaaattggcaacacagtggccatatttccttcctcctccagcttccatacactgttttgcccacagtatttgaaaaaataatatttgcaaacatttaagaattatacataaagataatttgaggattcacttgacaagtcaaatgatggggtgaaacaatacccacatttctggaaggaaactatcagctggaactggcttcccctttagacagatcatgccctaaaaatctgacccggtccccattttcctggtcccaatagacaggtgatgtttatccctgctttatatgataatacaaaatattttgccctaaacaaaatacaccaaagataaattatattgtaattttgaaaaatcacagtttttgtatttgaaaaatacctcacttaaattatttatacaatcctcagaaaagcacaatgagatagaaaccagcccatagtaacttaccaaaaattatagaaagtaccagttcccaaactcaaacttaggactcaggcatcaaattttctatttctcatgcgtttagacttaacagtcattaacactttaacaagaaggatttaaaaggatccttctcatcttgactgctcagtctaaaatagaaggcaaaataagaaaatgcctaccaaagggagtacagtggagagatagtgcctcctttgaagctgattcactaaggaagtcagttgtggccagaaaagagcagtaaaacactggagggagtgagagggcaatgctttgtaaaagaggaaatgaaaaatcatcaaaatattgtctactttactgtctgtcaagagctcaccccaaccttcagatgttcatatcttgtatcatataatcctcctggtcttgctctctccttcctctttttttccatcttccttctttctctatttccttttttaaaatgtttttgtagagacaggttctccctatgcttaggttagtctcgaattaatgggctcaagtgatcctctctccttggcctcctaaagtgctggaattacagccataagggaccatgcctggccatttgtctatttctcttcttctaccctctctctctctctctctttcttcctattttccttccttcctcacagatacatttatcactttctctgtcctgagcactcagtgaactctggaaaatgcataaagtatgagggtatcatcattaagagggcaagtttaaaaccacagaaaaagcatttgtctcatcctgatctcttaatcagaaactaccaggtttgatagctagaagtatatctgactttgcctgaatttatctgattaaggtggcaatatctgtaaataattccaaatctcatctcttctaaaaagcacctaccattgttgcctcaccttgttcctctgttctcttttccatcactttagttatcaaatagaagagaccacatctgacttttccattgtcttccttctcagtcacttgtgcacctgttgtaatctgtctctcttcacttgtactctacatggttttcttaaagtcattagttatcacctaatgacccatttcaaaactctcttctcaatgccatcctactgtgttcctcttgtatccagcactgtgaatgatcccttactgactataattcttccccaataatcattactcccctcttctcaccaactacttcttctcatccctaaagatgtttctcaaagttctttcctgagtcttcctatcatactcctgttctcttgttggtgattccatctatactcaaggtttcaaattcttctaattacaaaaatgacaaccgccaacattgtatgcagccatatgaataaatagttttaaaatagactttgggatcagggatacttaaatttgaatcccagttccaatatgttttggcactacgacctagaatttaacctgagttccagttttctaatcagaaatatgaagataataactgccctgaaatctgttaaggactaaatgaaataatatatgtttaacaattagtaatcacctagtatttgtaatacagagtattattctatttctaaaatgtgcatggtcctttcaataccattttatataatatataaaaggggaagccatgtctagtaaaagcttggaagttgattttgcaagactattcagataaaagcattttttttattattattatactttaagttctagggtacatctgcacaacgtgcaggtttgttacatatgtaaacatgtgccatgttggtgtgctgcacccattaactcgtcatttacattaggtatatctcctaatgctatccctccccactccccccaccccacgacaggccccggtgtgtgatgttccccttcctgtgtcctagtgttctcattgttcaattcccaactatgagtgagaacatgcggtgtttggttttttgtccttgctatagtttgctgagaatgatggtttccagcttcatccatgtccctacaaaggagataaaagcatttctacagtgagttgaagatgcataaagaatatatgttattttataattacctgacttggctaaaagatagaaatttaaaaatctagttaaaatgttgaaaacttagtctgggttccatggctcatgcctgtaatcccagcactttgggaggccgaggtgggcggataatgaggtcaggagatcgagaccatcctggccaacatggtgaaactccgtctctactaaaaatacaaaaattggccaggtgtggtggtgcatgcctgtagtcccagctagtcgggagactgaggcaggagactcgcttgtacccgggaggcggaggttgcagtgagccgagatcgtgccactgcactccagcctggtgacagagtgagactctgtctcaaaaaaaaaaaaaaaaaaaagcgaaaactactaactattgcatggcatccattctcctctttttcttttagtgatagccttgccccttatctagaaactgcatttactaacctcccttgcaattagtcatggccaggtgaaataccagtagtatgtgtttgtgtcaatagaaagtgaaagacaatctgcatctttttgggtattaaccagaaaacactgggtgtgtgcctacttgttctcttttagcccttcccctggactggaatgaggacatgatcatgttctcaggttcaactatgcagtcgtgtacaacacccaaagagatccaaaatccccataagagaaagttcctgggttcttaagtgaccacatggagcacagtctgttttgatcactttgaagctattacatgagatacaaattaacatggattttatttaaactattatattttggagattttaggtttcaccagcttcgctaactaactcattccctgtttgcccatatcaatttaccttaaaagtagaaattagctatcctgttttttaactaaatataaaatgatgaataattaatatatctattatactatctcctttaaatacagttttctctggcaggcccctgatagaagctggaacactatgagagactaaagtagctctggagtttccaaagtgcaggtgtttggttttgacagatgggtaaactagagacaagacaggagatatgctgctcggaaaactaaggaggctgacttgaaggattattgcccaagaagttaatctttccacttcatgtcagcagtagtaccctcaggcagagtaaagaattttctcaagagcagttttgacaagctcaaattttccaagagctgcttagttggtgacgcagagccctgcaccatagaacttggaaaattggactctaatttggagattctgcgagcaagatcaagacttccatcataaaatcagcttaataaggtccttccaggtttttacatttgagcaacattacctcccaaaatgagcctgctaatgtgagatgtctgaagaatttagtcctagacaaataaattaagagatctaataaatgaaatgatttactataattgatctgaatcagtacaacaaactttttttgtaaagtgtcaaatatgtataatgttagactttgaagcccatacagtctctgtcttaactcaaatttgccactggagcacataaacagcaataaggtgattctgatttttaaataagcatggccatgttccaataaaactttattttggacattgagatttgattttcatatattaggttggcacaaaagtaattgtggttttcgccattgaagtaatggcaaaaaccacaactactttgcgccaacctaataattctcacatgtcatgaaatactttttttcttttgtttttttcccccaatcaaataaatgtacaaaccattcttagcttgcagggggtgggccacactaggccaacaggccagatttagctcatggaacatagcttgctgacctctaatgtagatgttaaaaatctagaagacataattgacattgataattgtcttggtctgtttgtgttgttataacagaatacctgaggctgggaagtcaataaggaaaagagttttgcttagctcatgattctgcagactgtacaagaagcatggctgtagtatttacttggtttctggtgagggcttttgtgatgcattaaacatgacagagaaggtcaaaaggtgagtggacatgtgcaaagatgcaaaatccaagggatgcccggctttctaaaaacccactcttgagggaactaattcatttcttcaaaaactaacccagccttgccagagcaagacaccaagccattcatgagaatctggccccatgcaacaaacacctccaactaggcctcatcttccaaaactagtacactggaggtcacatgaggtttggtggtgatataaacccttgatccccctttgctgggaaccatggcaataatttaaggccatgtaagaagcacaatctacttgctgttgcaggataacttttaactagcccgtctgttatggactaaagccctaattctcagtgtagctgtatttggagacggggcctctaaagaaatacagtcatcccttggtatatgcaggcgattggttccaggactgccccctaagtacaccaaagctgtgcatactcaagtccagcagtcagccgtgcagaatccatgtatatgaaaagttggccttctacacgagttttgcatgggagaatactactttattttttttggagatggagtctcattctgtcactcaggctggagtgcagtggtgtgatctcggctcactgcaacctccacctcctgtgttcaagcaattctcctgcctcagcctcccaagtagctgggactacaggcacatcccaccacgcctggctgattttttgtatttttagtagagacggggtttcactgtgttagccaggaaggtctcaatctcctgacttcgtgatcctcccgcctcggccttccaaagtgctgggattacaggctagagccaccatgccagctgagaatactatattttcaattcttgtttggttgaaaaaagtccctttataaatggacccaagcagttcacacctgtgttattgtgttgttcaagggtcaaccgtaattaaggttaaatgagattataagagtgggacctcgatttcataagttagcacacaggctcgcttgctctttctctctgtctctcccccaaccccttctctccctttctccgatcacagaggaaaagcatgggaaaactcagcagctagaaagtagctctccaaaagccagggaaagagccctcagcagaaactaaatttgctggcgccttgatcacgaacctctagcctccagattgtgagaaataagtttctgttgttcaagccacccagcctttaatattttgttaaggcagcccgagcaaactaatacatatctaactactgttaaaattatttaggaattcattataaaggagaggagcctgttctatatttgagaatttgctccagctaagataaaatttctgaccaaggattggaggttgcaactaaaaataacatttaatagcaaagctcttatccaaaaaggttacaacctttttcagctcactgagattgtaatagtctgttctcacattgctataaagaaatatgcaagactgagtaatttataaaggaaaaaggtttaattgacccacagttctgcatggctggaaaggcctcaggaaacttacgatcatggcagaaggtgaagagacgacatgcgagataggtgagagagagaatgcacacataggaggaactgtcaaacacttatgaaaccatcagatcttgcgagaactcactatcatgagaacagcgtgggggaaaccacccccgtaatccaatcacctcccaccaggtcctgcccttgacacatgggtattatggagattacaatttaagatgagatttgggtggggacatgggacctaaccatatcagagattaacttgatattcccacaagtagggcaatacctgctcagataaatttatgtggtccacaaaatatgcatcatacataataggattagaatatctgagaaaatatatcccaatatacacatatttaacataatctcacaggaaatcccgatttctttctattgcatcaaatacaagcaagtacaagccttaactccatattgtataactgtaactcaaacattcacattgtagtttttaagttcacctagttgccacagaaacacttgaaagataacaaaatcctaagctccaacaaccatctgagtggatccccacttggccaaggggacaccagagcaaccttgaaaactgagttcttggctacagtgggatgggaagtcagacacccctccctggctatacaccattagggttacttccctaagtgctaagcagaaaccaccctttcaaaagattccaccactgatatcaaccaaccacctgatgctgcccctcttctactaactgatgagagacctctggccacagagttgtcatggccagtgtatggagaatctgcagtcagggtcttcatgtcctcttcttcactgcttgatgtcagagggctgaaaactccaccctcagattgtgctaatgctgccatttttgtacgtgggatgcaccaggggatgtaaaactcaattgcacatgtgcgtgtttctcctttcataaatactcatgactcttcctgaggcttattgaatatgtatattcagtcaccccactcagcataaattcctgttgctcctcccttgaagaatcttttctggcttctggcttaaggctaccatatgcttcccaggctgtctgaatggccatcctgcaggctgcaaccctttatgagaagtaaagctctccttttcaaatttatgaacctcttctgttgacacacttcaaactcaagaagtctcaaatgaaacaagtttcaaaatctcatcccataattccatgttttctatcttatttaatgggattcacccagaaactaaaaccaaaaatctaagctatagctgtatctcttccttatccctttttaatttgtttatttacttatttgtacacgaataagttctttagtggtgatttttcagattttggtgcacccatcacccaagcagtatacactgtacccaatggttagtcttgtatccgttgcctcccttccacccactcccccgagtgcccaaagtccattgtatcattcttatgcctttgcatccttacagtttagctctcacttatgagtgagaacatatgatgtttggtttttcattcctgagttacttcacttagaataatggtctccagttccatcaaggtttctgcaaatgccattattttgttcctttgaatggctgatacacacacacacacacacacacacacacacacacacacacacacaccaaatttttttatccactcattgattgatgggcgtttgggctggttccatgttttcacaattgtgaactgtgctgctataaacatgcatgtgtaagtatcttttcatataatgacttcttttcctcttggtagatacccaggagtaggattgatgaatcaaatggtaaatctacttttagttctttaaggaatctccacactatttttcatagtggttgtactagtttacgttcccaccaagtgtaaaaatgtgttctttgtatcacatctatgccaaggtctattattttttggttttttgattatggccattcttgcaggagtaagatggtaccatattgtggttttcatttgcatttccctgatcattagtgatgttgagtatttttcatatgttttttggccatttgcacgtttcttggccattcttcttttgagaattgtctattaatgtctttagcccactttttgacttgattgtttgtatttttcttgctaatttgtttgagttgcttgtagattctggatattagtcctttgtcagaagtaaagatttttaagactgtctcccactctgtgggttgtctatttactctgctggttatttcttttgctgtgcagaagctttttagtttaattaagttccaactatttatctttctttttgttgcatttgcttttaggttctttgtcacaaagtctttgcctaaactaatgtctagaaggatttttccaatgttatcttctagaatttttgtggtttcaggttttagatttaagtctttgttccatcttgagttgatttttgtacaaggtgagagatgaggatctagtttcattcttctacatgtggcttgcaaattatgccagcaccatttgttgaataggttgtcctttacccactttatgtttttgtttcttttgtcaaagatcagttggctgtaaatatttggctttatttctgagttctctattttgtttcattggtctatatgcctatttttataccagtaccatactgtttttgtgactatggccttttagtatagtttgaggtcaggtgatgtgttacctccagatttgtccttttagcatagtcttgctttggctatgtgagttcttttttgattacatatgaattttaggatttttttcaagttctgtgaagaatgatggtggtattttgatgggaattgcattgatgggaattgtgttgatggtaatttgatgggaattgcattgaatttgcagattgcttttggcagtatgatcattttcacaatattgattctacccatccatgtatatgggatttgttttcatttgtgtcatctatggtttctttcagcagcattttatagttttccttatagaggtctttcacctccttggttaggtagattcctaagtattttactttttatttttgcagttattgtaaaaggggttaagttattgatttgattctcagcttggtagctctttgtgtataacagtgctactgatttgtgtacattaattttgtatcccaaaactttgctgaatttatttaacagttttagagggtttttggatgactctttagtcatccaaatgtctctagggttttctgggtacacaatcatgtcatcagaaaacagcaacagttggacttcctctttagctatttggatgccctatatttttttctcttgtctgattgctttggctaggatttacatactattgatataggagttaaaaagaaattaggcagatagggatggtaagagagtcctcaataaggttttccttttaatggagagcagcagcccccaaattatctcttttctgacaaagagcagcctgttaaattgaactgcagacatagataagcaagctggaagcttgcatggatgaatgccagcagctgcaccaacagaaaaaggctacctgggggcaaggcatgttcaacatagtggctccatctgcccttttctttgtcgagcacatgtacagtaagaaacagacaacatggcactggccaggtagagaacccatctgcataacaaaagattaggatggggtgaccaggttattcatgcactatgtaaatggcacacacagtcccatcaatctttaggccctatgtaaatcaggcactgcctcctcaagccagtctataaagctccgtgcactttgccgtggactggaagacccatttgggagcccttctttctctgcagaagagagagctattctcttttctctttcttttgcctattaaacctccactctgaaacttactgtgtgcctgcatccttgatttccctggcatgagatgatgaaccatggatatttaccccagacaatgatgctgcttcagtatgttgaataaaagtggtgaaagtaggcatacttgtcttgttccagttctcagggggaatgcttttgatatggtttggctgtatccccacccaaatctcatcctgaattgtagctcccataatgcccacatgttgtgggagggacccagtgggagataattgaatcatagggtgggtctttcctatgctattctcatgatagtgaataagtctaatgagatctgatggttttataaaggggagtttccctgcacaaactctcttttcttgtctaccgccatgtaagatgtgcctttcaccttccaccatgattgtgaggcctcccaagccatgtggaactatgagcccagtaagcctttcttttgtaaattgcccaatctccagtatgtctttatcagcagcatgagaacagactaatacagtaagttggcaccagtaaagtggtatgctgctgaaaagatagccaaaaatgtggaaacaactttggaattgggtaacaggcagaggttggaacagtttggaggattcagaagaagacaggaaaatgtgggaaagtttggaactccctaaagatttgttgaatggctttgaccaaaatgctaataatgatgtggacaatgaaatccagtctgaggtggtctcagatggagatgaggaatttgttgggaactggaacaaaggtgactcttgttatgttttagcaaagagactggcagcattttgcccctgccctagagatttgtggaactatgaacttgagagagattatttagggtatctggcagaaaaaatttctaagtagcaaaacattcaagaggtgacttgggtgctgttaaaggcattcagttttataagggaagcagagcataaaagttcagaaaatttgcagcctgacaatgtgatagcaaagaaagtcccattttctgaaaagaaattcaagacagctgcagaaatttacataatttacctaagtaatgaggagccaaatgttaatccccaagacaatggggaaaatgtctccagggcatgtcagaggtcttcatgacagctgcgaccaacacaggcccagaggcctaggaggaaaaagtggtatcaagggccagacccagggttcccatgctgtgtgcagcctaaggacttggtgccctgtttctcagtggctccagccatggctgaaaggccccaatgtagagcttgggccacggcttcagagggtgcaacccccaagacctggcagcttccacatgatgttgagcctaccagtgcacagaagtcaagatttgaggtttgggaacctccacctagattttaaagtatgtatggaaacacctggatatccagatagaagtttgctgcaggggcaggcactcatggaaaacctatgttggggcagcacaaaagggaaaaggggtgggtgcctccacactgagtcctcattggggcactgcctagtgctactgtaagaagagggccactgtcctctagaccccagaatagtagatccaccaacagcttgcactgtgcacctggaaaagcacagacaatgccaacctgtgaaagcagccaggagggaagctgtaccctgtaaagccacaggtgcagagctgcccaagaccatgggaacccacctcttgcatcagcatgagctggatgtgagacatggattcaaaagagatcattttggagctttaagatttgacttccctgcttgattttggacttgcgttggggcctgtagcccttttgttttggccaatttctcccatttggaacagctgtatttacccaatgcctgtacccccattgtttctaggaagtaactaacttgcttttgattttacaagctcataggcagcagggacttgccttgtctcagatgagactttggtctgtggacttttcagttaatgctgaaatgagttaagactgtgggagactgtggggaaggcatgactggctttgaaatgtaaagacatgagatctgggagggaccagggcagcatgatatggtttggctgtgtccccacctaaatctcatcttgaattttagctcccagaattcccatgtgttatgggagggacccagtgggagataattgaatcatgggggcgggtcttttccatgctattcttgtgatagtgaataagtctgatgagatctgatggttttataaaggggagtttccctgcacaagctctcatttcttgtctgccaccatgtgagatgtgcctttcaccttctgccatgattgtgaggcatccccagccatgcggaactgtgagtccattaaacctctttcttttgtaaattgcccaatctcaggtatgtctctatcagcagcatgagaacagactaatacagctttccacttttccccattcagtatgttagctgtgggtttatcatagatgacttttattacattaaagtatgtcctttctatgcctattttgctgagggttttaattataaagggatgctggattttgtcaaaggctttctctgcattgattgagatgatcatgtgatttttgttttcaattctgtttatggggtgtatcacatttattgacttgcatatgttaaaccatccctgcatccctggtatgaaacctacttgatcatggtgaattgtctttttgatatgctgttggatttggttatctagtattttgttaaggatttctgcatctatgttcatcagggatattggtctgtagttttcttttttgtcatgtcctttcctgtttttggtattagaatgatattggcttcaaagaatgatgtaaggagtgtttcttctttctatatcttttggaatagtgtcaatatgattggtacccattcttctttgaacatctgatagaattccgctgtgaatctgtctggtcctggactttttttgttggtaacgttataattaccatttcaatctcactgcttgttattggtctgttcagagtttctattacttcctggtttaatctaggagagttgtatatttccaggagtttatctaggttttctagtttatttgcataaaggtgttcacagtagccttgaatgatcttttgtatttctgtggtatcagttgtaatgtctcctgttttatttctaattgagcttttttggatcttctctcttcttttcttggttaatcttcctacatggtctgtcaattttatttatcttttccaagaacaggtctttatttcatttatcttttgtattgttttggttgtttgtttcaattgcatttagttctgctttgattttggttatttcttttcttctgctgggtttgggtttagtttgtacttgtttctctagttccttgaggtgtgaccttagattgtctatttgtggtctttctgagtttttgatataggcatttaagactatgaactttcctcttaacactgcttttgttatatccaagaagttttgataggttgtatcactattatcattcagttcaaataatttttaattttcttcttgatttcattgttgacccaatgatcattcaggagcagattatttaatttccatgtattggcatcattttgagtgttcttattggagttgatttccaattttattccactgtgatctgaaagagtacttgatatgattttaattttcttaaatttgttgagactcattttgtggcttatcatatggactatcttggagaatgttccatgtgctgatgaatagaatgtatattctgcagttttggggtagaatgttttacaaatatctgttaagtctatttgttctagggtatactctaagtccattgtttctttgttgactttctgtcttgatgacctgtctagtactgtcagtggagtattgaagtcccctgctattattatgttgccctttttaaactcctatgtgtcaattaaagacaggctttttccatctagtgaatccaccattccccagggccttagagtcctaccttagatgggaaaactagaccctcatagacggccaattgctccttcacatctcagtccagatgcatggggcccagaaaatgtagttcaatgatttgacaagaagagaaaaatgttggtattagggagttctagaaatctttgccttcagattacagaagatagcttttatcttccgactatattttaaaatttaaatggtattaatgatattaatggttactaatgtctttctctgttttttcatgccattctattttatatgtaataaagaacttaatatgctgttacttttcttgcctttctcatctgctgttttcaatgttcagtttattattattgttaatattgttgttatgatataatttttttatgcaactattttctctaaatagcttcagtacttatcagcaattcttaaactttcccaatcttgagttctggatcttgattaatctttctgtcttctgaagaagattattggatagttttatcatgaaacttaaaaagatcaattaattagttttatgttctctaaatgtttggtgatataagaaagtatttctctcatctttgcacattctcttaaatttgcccaaataagaaagtatgtctgttgtttttacacataagtaaccatttaaatgtgtataaaattcttggattaaactatttcccctcaaaacttgttgaaattgttccattgtctttcaacatttgacattccacataagaagtttgaagcttatctgatttttttctcctttataaatgttcctaatttttggtttacctttaaaatgtttcaatattccatgatatgtctatgtttggatatattgtgattattttggagaaaactgtattagtctattcagtttgtagacataagtcattttgggtaaggtttattggggcatttcatatccataattatttattgcatttatttttaaggtaattagactttttctgttctcgatgtctataatttttactttcactgatgtccttgtcattttcctgttaattctttgatattgtgcatttttaactctgctcatttctgctttcaacgtacgttttaattctgccattgctttacatggttccttgctctcctttcttatttaaggcagacccctttacatctctgtctttgtggctgtctttttatgattttacaaacctacttcatagaggcttctttttcataaagtaatgtcccttttttatttttggtacaccatgcaaatattttataaaacctccatcccattgtcatagaagtaatatacacaaaacttctgccttggaaggttctagacaagatttcccttgtcttatgctaggaagaagccttgtaacttatgtttttctatttaaaaaaggagagatacattcagacccagcttttctcaatagacagggagggtgaaatttacttgcctcttcattcagctgtttccatgttaatagccttcctctctcagaggtaaaatcaaggtcatcagcctttaattttgtgctggtctattgaactgaagatgtatcttctgtttcttagatggttcactgacttaggaagagtacatcaaagtttaaagaccttatttgagcaatgaaaaagatgcttctatgcatgtactgctcccagaacttctcatgtgataaccaggaacatgtataaaattgtatgtgtttctacatttttctatgttttggacttccaagtgtaacatccacatgagtggagaaacaagtgttgaagcaaatgttggaaacagggagaataggccagaaatccggtacttgttacccagaagtgctgcctgtttctgttctcaagagcctccatatcatgcagtaagacataaacaatggaacggaatcaccatcttttcctgttgtcctaggttctgttctgtttcagagggactggcatacggtgcatggctaagaaaggacatttaatggggtctcatccagacattgacatgtgatctttgctcatcttgaacttgtgctagtggaaatatatttaatgtatctacataggtatattaattggaacttgatagtgcagataacaggcacatttaataacccaagtgaaattaatttatatacgtaagtgaagtttgaaagcatttcattaatattatatctttagggcttgactttataatcagcctgctcacttaacaaactaaaattcaacataaactacaaatctagtacactttgcattataccatagcagccacaaattaatgagtaataaataatgctgtgagacagtagaaaatgatgctagtaacagaagaaacgtttgcactcactacacccatggctttgctgtacttgacgaatattatcattcaggaaaatgttaagggattttaatagtcagttcctgccgatgatcaataatgacctcattattgcatgtgcttacatttttgtgacatcagaggaaagaaacactgcaaaacccagaattttccaaattaattgctaaaggtcttccaatacaaactcttccaactacactggcacatcatacccttttaactatttctagagctaaagtgaaagcagtagtgtatttaggaaaaacaaaaagaaaaacctagtattcagtttttatgcaaaatcaccaagactttaatgtaaaggggtcctttaaagaaacatactattctcaaagctatattactttatatggccatatgctgggatctcacatataagtgaaattggacttcaatagccataaggagaaatgccactttttcctcccaatccttggactaatgctgtttaactttttttctttttttttttttcctgagacatggtctcattctgttgtccagcctggagtacagtggcacgatctcagctcaccacaacctctgcctcctgagctcaagccatcctactgcctcagcttcctgagtagctgggactacaggtgtgtgccatcacacctggttagtttttgtgtttcatgtagagatggggtattgccacgtttcccaggctggtctcgaactcctgagctcaagtgatctcagcctcataaagtactaggattacaggtgtcagccactgtgcccagcctgagcaatttttgatgcataatttgacatgaaatttcagaaggcttgtaagccaacactccacccccatcctaacaaactaaggtaatcgtttctgcttaaaagtctctgaaaataatactgatgtaagtagagcagcataatacttcctacctaagaaaatatggctgttttcatgttctcttgttaaagaatcattgtgggcagataatgagaagcagagcctaaggaaaagaatggataaattgggaggaagaggagaaaaaataatagactggtctttgaaaggataagggttgaagaattgatgagttatatttgcaagacagttagtgattgattttggtatcttttaaaggcttctctacattatagaaacacattgaactagaagagaaggatgagagccctgataaaaatttaagtattatcctgagccagtccttaaggggagcatgctatgtagccctgctacattgacaatgtatataaaaggatatctttctaagcatccttctaggtatcagttagcgaatgttgttagcaagttaaaaaaatgtctctaggatctgtgtcaggaaatgctcttatttgtattagcctagtcttctctctaagattatgttacttatgagcagaagttgttctatgtactgtatactttcattttcatcttagtttcctttcataagtgttatatcaaagttctgatgattcattgaataattataagtagcaaaattaaaatatttaaaggaaattaaaaagatgagacttttataagactcatattcctacataagactgcaattaattatgagattgggaaaaaacgcaaattattaaaaaataaaaactgaccaggtgcagttgttcatacctctaatcccaacagtctgggaggctgaggtgggtgaatcacttgaggccagaagtttgaggccatcctgggaaacatagcaagaccctgtgtctacaaaacactgataaaaattaactagtgtgatggcctgagcctgtagtcccagctacttggaaggctgaaacaggaggatcgcttgagcccaagacatcaaggctgcagtgagccaagattacactactgcactccagcctgagtgacagagcgagactctgtctcaaaaataaataaataaaataaaaactatcaccaccagcaccaccaaaaaggagatctcataagctttttttaacatttccaaaacaaaggctctctaaacttctttttttctcattctagaaagctaatgatagaattttttttttcccctgaaagcctcagctacattcaccatgtcctgcatttattgttgacagctgttcaagacctacaaggtgaagttgaatattacacacttttttggagttctgctacctcaaacgactctctaaaaatcttgccagatgtaaactctcatgtcattggccacctaaagccaaacacagagtattggatctttatctctgtcttcaatggagtccacagcatcaacagtgcaggacttcatgcaaccacttgcgatgggggtgagtccagattctaaaggatatttgcctcagagatgcgaatgaaattgattgattcttgccggggttgagatcagtcatccctccattataaaatttccggtgtgggagggaagggggtggaggctaaaatgcttaagtgctcactgtcatcagtagcagatcaataagcagtcccattgagacagaagcacaagctctaataatgagatattagcccagtttgttcctgttcttttcagtgtatacttattttagaactgagttcacatcaataaatggtgacatttagaaactttttttttaagatttgccctcagaagcagtacgtttttcaaaacgacagccaaacacagtgagagccctccctgagtcaccagaaatggtaggtggaagttcagccactgagaaaaattgcctgtgactcatttctaagccagttagcaagggggaggaagcaagggaagcaacttgtgaatctgaaatgtgtttggaatggtctttctaatcttttttggctttataaagtctcattataaacattataatatcattacctcccaagcaagtgttccaggtcattagcagagctctttaagtgtggaacccatttccctttgtggtgccaaaggtcggcaccttttgtttataaaatagggtagatcacaaggacaattcttcaactagttaagatgggttcttatgataaaaataggtctttgcatagttatttctgacatgcttgaataattatgcaatttaacgctaagcaagatttttttcttatgttagatttcatcattacctatggtaatcaacattcaaaatcatttacataatgacaatattgcattattgcttcatattgcttgagttacaagctagtaacatcaaatgatttttcacgttccaccagcctcattgtatttgagttttattttttgctcaaggagcaaattttatttccttccctccctcccctgcaccttggaggtatagagtgaaaggatggaaaaaagacaaaaaatagataagtgttagtggtgcagatgggtgaataatttatcatcatatcccactggtcacatagtattgaagattagcactatgctggtggtataaagcattttaccaccaattcttatggtttctaactgagagtataataagccaatttacagaggactacagactgtgataacttcatcagcgaaaagcagataagcgaggaaccctttgctaaacctaaatactaatctgcatttagcttaacatgtgctttttcagagacagctggagtttattcagtttcttcctttaattctagagcctcagggcatgcttcctccagaggttgtcatcatcaacagtacagctgtacgtgtcatctggacatctccttcaaacccaaatggtgttgtcactgagtattctatctatgtaaataataagctctacaagactggaatgaatgtgcctgggtcgtttattctgagagacctgtctcccttcactatctatgacattcaggttagaacattgttttttgatggttaggcttatggatatgttaaataaaacatgccaggctatgtcttcaagtggatatcttctgtcttggttacagattatttctttggtggggaagggaaaagagagaagggaaattgatcagaattaaatctgtgtgctgtaggcaaacatgtgagtctctggagagaagataatgataatatggaaaacgatggtgatgaggatggtgatgaaattctcactggcaaaataaagctaatcatgtattctaaataaatcttgttgagcagcttaccttttcccaggatcttttactgaaatcaaaatcagaatcagtttgtaaatgtggagatgtttttttctcttcccatttctcctatttactaatttaatatctccagagaagttatgaaacttcacttggtgtcaatttcctcttttgtaagcgcaatggactagatgtcttaaaacattctagccacctctagcattctgtgattctgaatgcaacaggaagacatatataaaaaatatagcagacaaaaaatattaaaaggttttatctgaaggtgaaagaaatatatttattcatcactcaaaaaatgttcaatgttctccgcatatgtgagagcaattgtggttaaaattttttgcccttggacttctttgagaatcttatgaagtcagtgtactctgccttagaaaaatatttatgcacttgtatgacaaaatttaacacataatttcagaaagtgcactgatcacttgaagtcaaattcatagacttcttcaggggctactggccttaaaagtagaaaaagtatagggaatactaaggcatataaaacaaggaacttatcttcacggaattggaaatcttgttggagtaccaagccataaaagataacaaggctaaatgtgcaaatgagtgataaaaaaaaatcagagtatttcagaaaccccacatttagagaaagcttgcaatttacaaaattttttaataaactatgctacttctaaaattcataagagcttcgtaagataattttcagaagatattaagcacagaaattttatatgaccacagaaactttttactggttctatccatttaatagtactacctcattcaggtttccatctccttttcctgacatttgaggttaagacatataatcatctggctacaaccaacactttagtctcccctactctgactcatagacctagcttcctaagaaaaccaaataaaaatatctttgaataaagaagaaaggtacattaattatttttctttttttttcatttaaatgtattttattttaagttcctgtatacgtgttcaggacatgtaggtttgttacctaggtaaacgtatgccatggtggtttgctgcacctaacaacccatctaccaggtatttacctgtacatgtattattagctatttattctgatgatctccctcccctgatgcccccccaacaggccccagtgtgtgttgttcccctcgctgtgtccatgtgttctcactgtacagctcctacttataagtgagaacatgtgatgtttgtttttctgttcctgtgttagtttgctgaggataaaatggcttccagctccatctatgtccctgtaaaggacatgatctcattcctttttatggctgcatggtattccatggtgtacatgtaccacattttctttatccagtctataattgatggacgtttgggttgattccatgtcattgctattgttaatagtgctgcaatgaacatatatgtgcttgtatctttataatagaatgatttatatttctttgggtatatacccagtaatgggatggctgggtctaattgtgtttctggtcctaggtctttgaggacccaccacactgtctttcacaatggttgaactaatttacattcccaccaacagtgtaaaagcccttctatttctccacagcttcaccagcatctgttgttacttgacttttcaataatcaccattctgactggcatgaaatggtatctcactgtggttttgatgtgcatttctgtaatgatcagttatgttgagctccaggtgcccaccaccacaccaggttattcttttgtgtatattttcagtagagacagggtttcaccatgttgaccaggctggtatcaaactcctgacctcaggtgatccacctgcctaagcttcccacagtgctgggattacaggtgtgagccactgcacccagccaagtatctactttttgaataatccctttatatgtcccttttacaaagaaataataatttcatttttattcagttttacctctttttaatataaatatagtaagctttatatgtttgttggccgcataaattcttctttggagacgtgtctgttcatgtcctttgcccattttttttgatggggttgttttttcttgcaaatttgtttaagtttcttatagattctagatattaaacctttgtcagatggatagattgcaaaaattttctcccattctgtaggttgcctgttcactctgaggatagtttctgttgctatgcagaagctctttagtttaattagatcccatttgtcaatttttgcttttgttgcaattgtttttgatgtttttgtcatgaaatgtttgcctgtgcctatgtcctgaatggtattgcctgggttttcttctaggatttttatagttttgggttttacatttaagtctttaatccatcttgagttactttttgtataagatgtaaggaagggatccagtttcaattttctgcatatggctagccagtttttccagtaccatttattaaatagggaatcctttccccactgcttgtttttgtcaggtttgtcgaagatcagatagtggtaaatgtgcagtcttatttctgagatctctattccgttccattggtccatgtgtctgtttttgtaccagtaccatgctgttttggttactgtagccttgtagtatagcctaaagtcaggtagtgtgatgcctccacctttgttctttttgcttatgattgtcttggctatacaggctcttttttggttccatatgaactttaaagtagttttttctaattttgtgaagaatgtcattggtagtttaatgggaatatcattgaatctattaattactttgagcaatatggccattttcatgatatttattcttcctatccatgagcatggaatgtttttccatttgtgtcctctctgattttcttaagcagtggtttgttttcattgcacaccatgattcccatagcctacctgagttgtcttagcatggaatatgtggactgatgtttatgttcatgattcttatggtgagtccatgtatgcaggtagaccataggccaaattatgaaatagaaatcatgctccaaataaattagaaatatagctatataaaaaaggctaacacaggaaggtgatggaggatttgccgtattgtcttcttttgaccagtgttcgggaaagctgagttttcaaaggcaccttattcatttgctttaccaagactcgaaacacacaacctagaagtgagaacactgtgtgctgtgcatgcatgtgcagctcagctttctgactctggatcaagagttaacgtttaaaagtgtttaaggcctattctatggaaaaggctttatttataccactactggtttgagtcaggtataaataactcaagccagtaggtataaagcctcctcttctggtagcctgaggagagtggaaacagatgaaaatacaaaagatcaaagtagaatccaataatagaattttgttattagtgcctaagatattcttattactgattactatattttttgtgaagctttttgcagtccaggaatactgtacttgatatagctgttgcatttctggaaatttgaacatcaaatttcagtgattttcattacgatgtcaaaggtgatttagtttcatttaaaataagcatttgattggaatgcctaatactttagaattaaggctctctatgctaaccccatctgtaaaatagctattgattttaaagcacataacacactcaagtatctacttttttttttttttttttttttttttttttttgagacagagtctcactcttctcacccaggttggagtgcattggcacgatctcggctcactgcaacctctgcctcctggaatcaagagattctcgtgcctcagcctcccaagtacctaggattccaggtgcccaccaccacaccaggttattcttttgtgtgtattttcagtagagacagggtttcaccatgttgaccaggctggtatcaaactcctgacctcaggtgatccgcctgcctaagcttcccacagtgctggaattacaggtgtaagccactgcacctagccaagtatctactttttgaataatccctttatatgtcccttttacaaagaaataataatttcatttttattcagttttacctctttttagtataaatacagtaagctttatatttgtgtttcattcacatgttatacaatatcgttttagcactagaaataggtcccaaaatggagactgggaatgttaacattagtaagaataaaaacatattggcacatttctctaacatttgaggttaaaacatatataatcatctggctaccagcagtagtcattggtcattttcctttgaccaatgaatcaaaagaaatgttttctggagaaacatttgaatatacctaagtagtttagagcttaaagttatgtttaacatttagatgagaagccagtagggtacagtggagaacaactcagatatcccaaatcttaccagcttgacaatattccctggcttctctgcaaatttgtttaaatggagttatgaggaatcaatacgattatttgtgcatatatccattataatatttggcacatattagatacataataaattcagttgaattgattctgggttatctcattatgtatcacagaatcaaatttttccaatatgtataaagttcattttcattaattatattacagcattatattttaagttcatctgcctttatttcagatttaattggacatgctcagaatgtaggcccttgatagtgtttaaatatccactattaatacctcaaaagactatatggcatcaataagtaacacaactcatacagcattatgaacatatgcctcaactaacatttaggtaccctatgaataaaatagcatatctagtaaatacaagaatcccatttgcctttcctcaaccaccaaaggaacagagaactgtttcacataaaagctcggaattaatgtttaagattcatcagtacctagcttgccttctctatttatatattagatgcttaaagtaaattagcactgtaaaaagtacagtttctctttggtttatcctttaattgagagcagaatgatatcgctttgcagatgttcccaatcttttgcatattcatttctctctcctccctcttggttaacgtgttccttttgtgtgactaatgcttgatgaaccccatttctaatcttcagttattccaccctcctcggtttttattcagattaggtggcagaattaaagggatgaatgatgattttctgctgtgattaaggtaaaaatacaattgcatctggaacaaatggatataaaatacctcagccatattggaaggcttctctaggcctcatttttcctccattagacattagcatttaggctatttgttttacagtgtcaagacttccagaagataccatcattacactacttagttatagatttagagaacagtgagcagtgataacctgttatgcttgcaaactgtcacttgggcatcttccattccttgactatgctcttcagtagattaatgtatctttctctttgtgaatagttgcaaccagagagtaaacatcatcattcccattactaaatcaattatcttgatcccaattccgtaccttcctctgagctcattcctttggagtcagttaacatcaaaaatgaatattgattaaacctcaagaggctatagagaaatacaagagattcatgtgaaatgagggaaggtgggattcagactattgttagtaagtatttcaaaaatggttgcatttattttttctaaactaatgtttgcaggttgaagtctgcacaatatatgcctgcgtgaaaagcaatggaacccaaattaccactgtggaagacactccaagtgatataccaacacccacaattcgtggcatcacttcaaggtacaaaattttgtgtcagttaaatctaaggaactctgatcagaagaaatgaaaataaaaatcaaaggtatcctctcagccatgacaatctcatttaatgggttattataagtatgtgtgtaaatcaaatttttgatattatttcacagatattaatcttcactggacatccaatggcatttaatctttaatttccctgattgcccagcctcagatttcttatttagtaacctgtaagcaaatacttgaaatacatgtctccttatttgaatgtgtcctttagtgaatccttttgcggagcataatacaagcttaattgtaatgactaccttctaacttaatctttttgaaaaaaaattgatttatatacatcagagtgccctaaagctagaaatctgtaaaattagtagggcagataatgtttagataagcattaccaattttgtcagcttcttggtagaatcactttatttttctttattcttttgttgctgagaaatgaccatagtttgaaagcgagtctctttataattcataattagtaacaacaacaataataataatatttggtattgtttccaaagctgaaaataagatggtaaattgttcatccgtttgtatcaagttgaggctgggaaaagaaatcttagtgctttcacattatactttttgcttaagccaaatgaatcacccttctcttacatgtgcaaacaacacacacacacacacagacacatacacacactgaaataataagtctattattaatgtttcaattctgaaggatttctctatgacatgttgaaatttctggatcttaaatcagttcaaaaaattagtactggttttggcaaccaatggttaaaataattagaaaaattcaactaacctgactgttagctgttcgtggcaataatcatatcttgtctgcttgagtatatcttctatcaaacacatgatagatactgatctaatttttggcatactaattagtttataatccccccagcagatatcccccaacctattcacagtattatctactatgcagggaggaaatagtcatattaaatgggcgttagagacctttattctttagcaaacacatctgtggctataataatatagaaggcaaggtggggcgtggtggctcacgcctgtaatcccagcactttgggaggccgaggcgggcggatcacaagctcaggagatcgagaccatcctggctaacatggtgaaaccctgtctctactaaaaatacaaaaaattagcagggcgtggtggggggcacctgtagtcccagctactcgggaggctgaggcaggagcatggcgtgaacctgggaggcggaacttggagtgagccgagatcacgccactgcactccagcctgggcgacagagtgatactctgtctcaaaaaaaaatatatatatatatatatatatattatatatatatatataatatatattatatatatataatatatattatatatataatatatattatatatatatatataatatatatacacacacacatagaaggcaaaagtaatacaaaagagcataagacatgattctaaatttgcaaagttccagtccactggggaagatactcccctaaataaatgtttatagaacaatgtaaaaaacactataataagaggtttagatgtgcaagaacataaagagaaaaatagcaaactttacccagaattatcagtgaaggcatcatggaagatgtgacctttgacttcagtcttgaaaagctcaaggaagaattatagttaggtgggtggatgttttcaaattcttgtctgctggcatccccatgactcaagcccatgtgaatgacgtaacagaatatgcctcatagtacatatttatttataactaaaaataacgtctaagctttataagaaatggaacaaatgtgactgtgtctctaggttttttttcctttaagaagattattgcacataataacagaggacaaatatttttagttgctattaaaaattgcttgtatccaaatacattaaattgatgacagaaacattaaaaagagtattatacaacaagaacaaggaaagtgagagaggagacaacaacagaaaagagattgcaacacaattttgtaagcaatatttgtcagaaagaagcaaatgatttaatacagtggagaaatttacaaccaaaatattggttgacaaaagacaataatgacaggaaacaaactgttttttccacagagaactggagaggctgagcacttagaagttttaaggatgtaaagaggaggagagagggtagggtttaaagctgaaatcatggggtgagacacaactgttaacaaataagtgtttggaatcccaggtctcttgcatctttgctgtgcatccaggggtctatttctcttcctccacatgacaaagtccaccgaccaggagattagacatttattctctggagaaactgagggctactaggcagaggggagctgagatgagacacagaagtaaaaacagtgataaagtgagactacaacctgaatggtgggctttttggctaagtttcccagttctgccctcaaaagcaagtagacaagtcataaacacctccagataggaaactgaacatagttttctagaaaaaaaagaatgatctcaaaaaaaatacctccagataatagcatatagggatccctaacagtaaaaacaacttgtcctctggtcacccagtagggaagtatgccaatcaacaaggctcacctaactataaagcttttagtcagctttttttttttttttttttttttttggtgcatcactcttaaagataaaaaggggaccaaaataaacaaaagacatgatacaatagattcagagataatgcaggtgaggaaaaaaaattatagcctcagacagataaaagaaaattctctaaccataaaacaaaaccagcatacttaaaaaaataaataaataaccaacgaggagaaaacttcatggaaattaaaagggtgaaaagctgaattgaaacttttgaagaaagttcaagggaatgtctctgaaaatgcaatgaaacacaaagatttaaaagagagagagacaaagaaaaaacaatagagagtatccaggaagtctaatatttgaataataagagcttcaaaagagaatcaaaggaaaagagggagaaaatttaaaaaaaaaaaagacaagaaagtatcccagaaccaatgtactactgtgcagatcaaaagattccctggataccaacaatatgactaaaaagtgattacatataaagggatattatcaggaaattgcagagtaccatgtttaaaaagcacatccaaaaagctgccaggaagaacagacactaccacaatcaggatgtgaagcagcatcatgatgtcggtctccattattgctaacccctcttctacccttcctaaaactaagcaaacactgccatgttttgttatgtataattctgccttttccatattgtcatgtaaatggatcacataatatgtagccattcaaatggcttcttttagttagcataatgcatttaagatttgtccatcttattatatacatactagcagttgtatacatactagtagttgtcagtttttgttgctgagtaagattccattatatgaaagttctacagtttgtgcacagtttggataattttcagttctccgtgaccacgattaaagttgctgtaaaacatctatatacaggtttttgtgtgaagatatattttcatttcatgtgggtaaatacccaggagttggattgctgagtcataaactgccagactgatttacaaagtgactgtaacatctttcattcctactagcattgtatgagagttcaagttgctctacatttttgctagaacatgagatactatgaggtgttttcctcttattttttaaatagtcattttaatagatgtttgtggtgtgttattatggtcttaaattacattttccctaatgactaatgatactgataagctttgcaattgctttttgcatgcactttggcatttgtttactctgggaaatggtatctccaaatcttttgcaaatttcttaattagattctttgttttcttattttttgagttttgaaaattttttaaatatattttggatttgagtttttgtcacatatgtgatttacagatatttcttctctaccttatgatttgttttcaattatcttatttgtgtgtttttaagagaaagagttttaactttccaagagagttagatttgttactttttccttgacagtttgtgcatctggtattttatctaagaactttttgcctgagttaaggtcacagagactttctcttgtctatttcctagaacatttgtatgtttacatgttgaatttatgtctatgattggttttgtgttaatttttgtatacactgaggcatgagtcaaggttaattttttttggcatgtaagtatttaatagtatcaacaaaatttttggaaagattatcttttctttattgaatatttttagatttttgtcaaaaatcaatttaaacacgttttgtaggccatttttggactctcttttatgttcaatttatcaatatgtatatctataccaatatcgcacaatcttgattactacagctctatagtaagctgtcaaatcacattgtatgagtcctccaactttgacctttataaaaatcattttggcctttctcactactttgcctgtccatataaatttcagaaacaggtcattgatatctacaaaacatgtgattttgattagaactgcattgaatttgtggatcaattggtagagaattgacatcttaacaatatcaaatgttctgattcaagaacacactcttgctcatttatttgcatcttctttcctttattttatcagtgttttatataatccagtatgcaaatactgcacatattttattaagtttatacctaattacttatttggggggtgctattattattgtttctttaaaacaaattcaaatccaattgttgctagtgtgtagaaacacaattaattttggaatagtgagcttacatccagcaaacttgctaaactccttgtaagtcttaagagcttttttgtaattccctagtctatatagatcttctacaaagagaaactgtttatttttttcatttccaatcagtatgtcttttatttctttttcctgccttattgcactggatagtttaataacgtgataagagcatatccttgacttgttcccaatctttgaaagaaaactttcagtcttttacccttagatgtgatgttacgtatgaaatttttggccatgccttttatcacgttgaagaacttactttttatttttaatttgctgacaattttcattataaatggacatggaaatttgtcacatgcttttttgacattttaaatttgtactatgatcgattatatttactgattttaaattattgaactagtttgtattcgctggataaccagaacttcgttgtgacatattttcttcttcatatattgggggatgcaatatactattatcttatagaaaatgttcatctgtgttcataaaatatattggactgtgtttgattttcttgtaatacctttgcctggattgggtatcatggtaatttctggtctcatactaacttgggaagcatttccttcttttctattttgtggaagagattgtacaaaagtgttattatttcttaaatcttggtaaaattcaccagtgaaacccatatttgcctggagtttttctttgatggaaggttttttaacttggaattcaattcccttaataatgtatgatatttggcaatttattctccagtgagtttagtcatcttgtgggtgcagaaaataggttaatttaatcaaatttgtcaaatttattagcaggaagttgtttgtagtatgtttgtactacaaacaacaatttgttgcaattgattttattctttcatttctgatattggtagtaagtgcccccgtttttctgttcagcctagagttttatcaattttgtagatcttttcaaagaaccatttttggctttatttattttctatatcatctacattgttttctattttccatttcagtgatttctgctctctattgttttcttccctcttgccttgctattgcttctctagtttcttaaagatgaaaactttcattattgatttgagacctttcttcttttctctcagtcctgcttcggtatgaagctcacaaattttgaaatgttgcattgcacttcatttattcaaaatatattttaatttctcttgagacttctttaacccatggattatttacaagggtattgtttaatttccaagtatttggggatttttcagataagtttctatctgagtttccagtttaattctattatgatctaagaacataattttagaattccaattcttttaaattagttacagttttttcagggcccagaatatgatctatcttagtgaatggatgtgcacttgaggagaaggtacagtctgttgttgtcagatagagtgttttgtaaatgtcaattagatcaagttgagtgataatggtgttcagatcatctatatacttactgattttctgcctgcttgttttatcagttattgtgagaatggtgttgaagtctccaaatgtcattgtggctttatctatttcttcttcagatctattagtctttccttcatgtactttgatgttttattattaagtgcatacatgtttaggattgttaatgtcttgataaactggctcttgtatcattatgtgataagcccttttacttcctgataatttccttgttcttaagtttattttgtctaatattaatatagccactccagctttcaattgcttagtgtaattctgggtgatttttcgattgattccttcacattttgaatattacgttataaaaatctgactcctgttaaaatcctttgaagaaagttagagttcttatttacttttttcagcaggttaccaactggttagcttcagactccaaattctgttttcctttgccagtgactacagtcagttcctattttttcataaagtagcataacaaagctataaactttgctttactactctgtgtctgcacaatggctaatttgggatttggctgtagaattatgtaatagttctgatctcaaaatcttcgctgtgctgcttgcataggctatgcatgtgaggcaaccataaatgtgcagcttggagttgagtcaggacttgcgttcgttcattcataaaattagcttctagctttcttctctctgaaatgtcccccatctttccagctcctttggacttccttccctggatttttggctagaatgatatgatttcttttgaaatgtttgcctcccagcctgcctccaaatttgcataactggagttgttcttaggcaatgaggtaagaggaattcgagaaaaaaaaataacaaggacttcccccacattctttggactatagaggccccatttcctgatttctctggacagaaagatttttccccccgttggggctttagattccaatttggccacagctgccgcagtgcagctccttggctctgatcatcctcggagcagggcccagcagaaagaagacaaaacaaaacaaaaatgggggttttccctatactctctggcttgcaaggcattttgttctagatactctagccggaaaaaatttactttctctaggattttgcttccctagttcacagtttcacactgatactgcccttgggttaaagatgggaagtaaaggagggggaaaaaaaatgggaaactcaccctgtaacattcattcttaaagttttgtctcccctcctgatcagccttattgttagcttttcagagtcctcaggtagttactttatataatttttgcagatactgagttgtaatcagtgggagagataagctgtaatgggcttattccatattggcctgcatgggaagtccccctccaccacagttttctttcttccaatgcctttggcaactttccttttcccccccagtcagaagcctagcaaaaacttgatagaaatcattcataaccaaatattggcatgtaaaatctttcctttcttaaaatgatccatagtagcagagtaacattttccaaaggcaagactctaatgagcaactataggctgccaagccattaatcaaaattataccaacaccaaagcagttagccttgtgtgtgtatggtattgtttgtgtaatttcattatacttctggcaatgtatacttgttagttatgtttctattttggttttaaaaaatctttcatattagcaacatgcaaaatgaaatgtgaaatccttccagaaaaacatcagcagacggggtctacttctctagcatttaaaataatttggtttctaagaagccatacatttcttagattctttgtttatttttggtgaaattcagaagtcagtaaaatttaactcatatatttcaataacatacagatagcataccagcctgtttgattatatgcgtgcagtgtaccaactcatctttgtctttggccttaacttatgccttgtttttgactacatcttcagcagtacaagcccttatgcatgtttttcctcttatatataaaccaaagattccatagcacacaaataatatagaagaatcaaatggacccttctagttttataagctgctgcttcagagacaagccctgtttctacattgcattttccatacttctcatattatcatcagctccttctatatcccaaaagaatactaactactgatcgataacccggacatgtctggccatggcctacatgtgccctgggtagttcatttatttgtcttggtggatttgctagagtggaatttaatcaatagctaattcattaattctggtcctcgagaatgtagagactgacctggatgaagataacgggctgggtctggctttgatagaaatatgacaaacactgcagctgacagcttcactaggtactgtgctatgaagtttagttatttattccccataaatggagacactaagaaaataacacaaacaagaaagatgttttattacattactgttagtattccaaaatgcatcatttccaggcatgaggctcaagggaaagtagagaaagaactcagatcatgtcttttaatgtctttaattggaaccatggcagttttttcacatccaaatcagtttggggatgtgttattgataaggagtgtgaggtataaagtcttcgtagcactcacaaataattgttttaagatttgcttctagatgctgaatgagatcaatgatattcttatacacaaactttgcagaaatctttctgataacagcataggttagatgtctctaaatgaatgctaaaccactatcgttattaatgaatatctatatatttttttcttttttgttgttgttgttgagacaggatctcgttctgtcacccaagctggagtgcagctcactgcagccttgaccttccaggctcaagcaatacttcctcagcctcctgagtagctgggacaataggcatatgccaccacacccagctaatacatttttaaaattattttgtagagttggggtctcactgtgtcgcccaggctggtctttcgaactcctgggctcaagtcatcctcccgccttggcctcctaaattgctggtattacagatgtgacccacacagcacccggcatccccctatatttttaaattacttaatgtggggttaagtatggttcaagaggtcagagcttgtggagaaagaggattctccttttttcctcaccaaattttatgagacatgctatgatatactttttatgctatgacattagatatcagggaatctcttctatccttgattttttctgcctaacttttctcagtgaatgatagcttcaactgaagtaatgattttacagttttgtaaaattaaaagaaaaaattaatattttacatttaatttaattatttaacattacaagaaaaaattaaggccacatttctgtttgtttgctttaatagggagagtgttgggctgaaggatacagaatgtcaaatcacttgttttcacctgtataccaaacttgcttaccaatatgggcaattgtagactatttttaatatggactaaaactgtctgcttaaacctttaaaggatatgggtagaaccttgaaagagagaatttggactacactaagtgcaattcgtacagatccaatcaatagccttatggtcaccatggcttttaggaaatattactcatttgatggccatgagttctgattatcacattctgtttaaggagaccttaatagaatagtgtcagaatatagaatgtaaacagaaagacagaatatatagaaaagagaatattgggcttattattatggctctgctatcactattttcatttccttacctccctcttcttcccaaactcctcctaacttctttacctcttgtagctcccatagaaacagctcggtcgctgaagtagcctttgagtgcctttcagcaaaatccagttcttcctcctaattcactttagccctcaactgccactttgtccctggttctctaaacattcattgttttgttttgtttttattggttccattaaaaacccacttatgcattctgggtgtcctcaggaaaaagactccctaccttgctcaggtagttcagtcttgcaattttaagccatactgatgtctcaaagatctctggccctgttttcttcctaaactctaatcccacatacccacttgcctattgattttatgtcatgatattcacccatcacttccataaccatgagattcacaagttaattcttatctaactcatcatcttttccaacactcacttctgcaaatgtaccaccatcctgcatattatcgaggacatatatctttgaagtatttttaatcccctaagtttattaaacactgattttagtacattttctgttggagcatcttctcatatatgttactcttctccatttccaccactaccaccctggttcatgttttcatcgtttaagtttatataaccattttatggagctgtcttaatccaattagatacaaagagaaaaaaaaatcctttacttttcacctgctacttactgccttaaacacactgttttggctatccttccctcaattctcaaataccccacaggaacatcttatgggtttccaattatttttagttatgagtctcactttgataattaagattcatgatcaagtattaaaaagtccattccatcaccatcaaaatattagcctcgcatctagttcaaagattctatcatttctaaagctcaggcctaattgtagcttgctcttttcttccctcttactctttctttcctattccattttatccaaatatgttccctttcaattttattacttcactgccatcactgtttgacaatcacagctctccattggcaagtgatgctttcttgggcaattgtatgtttttcttgagaggtcctcatgagaatctttgaatagccaaattccctcacacgagtgttgccctttatagctgatcacttgtggtgccaaaagagcagaacattccaaagactcttcctgctggagtctcctcatgccagaaggccactgtcctgggccatgtaccttcaagttagctcaaacctagccatcttgcaaggcatccacttggctcttgagaaactcatccatctatgccatgctatagatcaatattgtggtattctaggcttaacctttcattgcagaactgctctggccaatctctggccactagaattctctaactgagaagtaagctttatttcctatgctcatacagactgccaaatttaagagttccctgtcaagctgtcccaagatctcttcaccacattttcctccaaggacaaaaggagggaaatgtgtgttcctttttattaaaagaacatgggttttgcattttgactttttacctactacaatttataataaacatctcagtaggataattaaatattcagtgacttgacttgaaagcaaagaattaaatttgtcatattacatttatttcatctttgttaaaagtgttctgatcatttttgataaccatgatctggaataatattgaagaacttgagtgttacataaatgattgacaaaaatgaccaaatcgattagaaaaaaagcctgtgtaaacataaccagataatctagagctatttaatccataacaatttaggttaatatcttagagtgtatgaagatttcttttctctggtcaaacaaaaatgttttgaaaaaattggggaaaaatattagaatgaaatgttaaagaatagtaatgtgaacctgtcttcataaaaatttgatctgacttgtatcattttgatattcacctgtgtaaaggtaagtgatatcaaattattttccctacactcctttgtatcttcaatggtattttgtacttcaagggacaactggaagtgatgagatctggggagggtgaaatgcatctgtaatcctaactagttgggaggctgagtcagaattgcttgaggccaggatttgagtccagcctgagcaacatagcaagatcccatctctaaaaataaataaagaagaaagtgatgacaactgtgggggtggcacaatagtatgtagtagtaacagtaataaaatagtaattctgctgacaatatgacataattaaaaagaaataactacaactagaatgtctgaacacttgatgaattcatgtaccaaaatatgtgtaaagaacttccagttccaaaatgatgacatagaagcaagctggcttcactcctctccacagaaaacagaaacaaatgtacagaactgagattatcacagcaatatcccagaactcaaatatgaggacaagacagttcccaaagtcacagagaagtgaaaatctccgagcagatggtaagaaaattggactttcatatccacaatgcccatctccccaatatattcagcaccacgcttgtggaaaatattttcctgacccttgatttctgcactggaaaagtgcgattgaagtggacagtttcccgaccgtcttaggttacctggcaggagacctttacctgcctcaacccacaggaagcatcaggagtgcccgaagggctctatctctgtgaggacatccagagacaatgtggggagatgggactaccatcaccagccctggaaattctgctctgtaactcagtaaaaggagatgccaaatcagagtggctgttcagcagcaccacactgtagtagttttgctccacaggtttcctgggcaccaatcctcagccagcctcctcacactaccaggatatcccctttggaacctcccctatttgggaaaggtggtattctgatagtttactggagacaaggcaaacctggacctgaggcaccatctagtgccaaaaaggaggcagtgacccagtgaattaaaaaaaatgaaagaaaatgaacagaaaaattacaaagaatctctatgcaaacatacctaagaaaaaccaaagcaagccagagaagactgcaataaataactaatccttcaatgcaaagacatagacatatatccataagaaatggagagaagagtaatatatgagaggatgctccaaaagaaaatatactaaagttgctgtttaataaattcagggaattaaaaataattcaaagatacatatccttgataatatgcaggacggtggtgtgtttgcagacatacaacttctttaaacagggaagtaggatcttctcaagctgacaaaagcaaggaaacagtgagtgaccctaacaagatggtgataggtgaactctatgaccaagaattcaaacagttttaaggaaactcatgatcaccaagatagtacataagataaattcagacatttctcaacagatttaacaaagagattaaaatggttcaagaaattaaaaaagaaatcttggatctgagaaatacatctgctgaagtgaaaaattcattagaggctctcaatagcaaactagatcagaggaaagcatcaacaaacttgagacaggctatttgaaaatacagagaggtggggataaaagaatgaaaacaagtgaagatcacctacaaggtatatagaaaactacctgaaaagacaaaatctaggaattattggtgttcaagaggaaggtaaacaagagcaagaggtagaaagctttttaaaagaaagattaacagaaaactttgtaaaatgtaagaaacagagaaatatccagatatagaaaggtcagagaagaccagatttgattaaaataagattattccaaggcatataacaatcaaattcttaaaggtcagtgacaaagagaggatcctaaaagcagcaagagaaaagaagcaaataacatatttaaaagcttcagtttgtttggcaacagtctactcaacagaaaccatacaagctaggaggaagtgggatgacattttcaaagtgctgaaataaaaaaacaaatgccatataaaagtactgcatacaataaagctatccttcaaatatgaaagagaaatgaagtccttcccagataaaaagctgaagtaatttaccactatgagacccatcttataagaaatactaaagagagttcttcaaactgcaagacataaaaaactaatgcacagaaagaaaacatttgaaagtaaacccactgataaattaagtacacagacaaacccagaatactctaatactgtaattgcagcatgcaatccactcatcacttcagtatgaagcccaaaagacaaatttatcaaaaacaatagtaggtacagcaacgtgttaagagatagacaacataaaaatatacaaattgagacgacataaagtcaaaatatggagaaatacagttaaattttagagttttttcattgtttctttgtttttggcaaccaagtacaataaccatatgatcatttcaatagatgctgaaaaagcatttgataaaattcaatatggctttattataaagtccctcaagaaactggatatagaaggtgcatacatcaaaataaaagccatgtatgacaaacctatggctaacattgtactgaactgggaaaaaatgaaagtctttcctggaagaactggaacaagacaaggatacccacttacacttttattcaacacaatactggaaatcctggtgaggcaatttgtcaagagaagaaataaagggcatccaaatcggaaagggataagtcaaattagccttgttaacagatgacatgctcttataattagaaaacctaaagactccaccaaaaaacctgttagaactgatgaacaaatttagtaaagttgcagaatacaaactcaatgtacagaaatcaatagcagttatatacaccaacagcaagcaatctgaaaagaaatcaagaaagtggtcccattaacaatagctacaaagaatataaaatacctaggaatcaatttaactaaaggagtaaaatatctatacaagtaaaactataaaatgctgatgaaagaaattgagtaagatacaaataaatggaaagatattccatgctcttggattagaagaattaatattattaaaatgacaattttacccaaagtaatttacagattcaatgtaatacatatcaaaagaccaattacattcttcacagaaatagaaaagtatttctaaaatttatatggaaccacaaaacacccagaatagctgaagcaatctgagtaaaaaaaagacaaagctggaggcattacactaccttacttcaaaatatagcacaaacctaaagaaaccaaatcaacatggtattggcataaaaacaaacacataaaccaatggaatagaatagagaacccagatataaatccatgcatttacagacaactcatttttaacaaaggaaccaagaacttgcaatgaggaaacagtctttttaataaatggcactgggaaaactagatatccatatgcagaagaatgatagaagagacagaagagatagacccctatctcttaccgcattcaagaatcaactcaaaatggattaaatacttaagtctgagacctgaaactgtaaaaccaatagaagaaagcattggggagatgctcccagacatgatctaggcaaaggcatttgtgtaagatctcaaaaacactggcaagagaagcaaaaacagaaaaatgggattacatcaggctaaaaagcttctgcacaacaaaggaaacaatcaacaaagtgaatagacatgccatagaatgggagaaaatacttgcaaactgtctatctgacaatgaattaataactgggatatataaatagcttaaacaactcaaaagcaaaaaacaaaaacaaaacatctgattaaaaatgggaaaatgatctgaataggcatttatattgcctattgcctattcagaagacatacaaatggccaacaggtatatgaaaaaatgttcatcatcactaaagagatgagaattgcaactcaaaaccataatgaaatattatgtcacccagataaaatggctttgataaaataaaaaagcaggaaataatggatgctggtgaagatgtggagaaaggggaactctatttacactgttggtgggaatgtaaatttgtacagccactatagaatattgtatgggggttcctcatgaaactaaaaattgaactactgtataatgtagcaattcactactgggtgtatatccaaaagaaaggaaaacaatatattgaaaagacacctgtactcccatgtttattgcagtgctgttcacagtagccaaaatatgaaatcaacctaagtgcccatcatgaatgaatggataaagaaaatgtggtacatatacacaatggactcttattcagccataaaaaagacttaactcctattatttacagcaacatggatggaactggaggtcattatgttaagtaaaataagtcaggcatagaaagacaaacattgcatgttctctttcatatgtgggagataaaaaagtgaacctcatgaaggtagagagtagattggtgattaccagaggcctgagagggtcatggggagagggagaggaagaatagattgattaatggatataaatttacagtttcaatgaagagataagacctagtatttgatagatcagtaaggtgatttatagtttacaatatcttttacatatttcacaataggtagaagggaataatttaaatgttgttagcataaagaaaagacaactatttaaggtgatggatatgccagttacattgatttgctctttacaaattatatgaatgtattaaattctcacatggaccctgaaatatgtacatctattatgtattgattaaaatatatttttttaaactccaggcttccccaagattgtaatccacctgtaatttaactgactgctagtaaagcctgttactttcagaggaaaacaattcaacctagagactttgcaaagtataatccacaatgttgtgtgtatgtgggctgtgtgtgtgtgtgaaggaatgagaaaatgtaacccaaacatttgagagagaaaaaaatgtgtgtagacatggtgacttttatcagaagttgtattaaggtatcttaaatttcagttcctattactttaaaatctaaaaaaaactataacagttatttcatgaacaaatctaccaaaaaaaattcattcaaatatttgcaatctgtttatgtttatgcatgagtgcccaaaagtatcttcagctctttttctccaatatttaacatttattcctgggattgaagaatgttccttctattttactcttaaacatcaaagcaatgaaactattaatcccgctaataatgatgcatatttctcaaagatgcctttcattttcagatcagcaaccaaaggagtttcaattgtctctccagttggctctaatgagagatgtacagatgttaaacccaatactcttcttaatcattttccttcgtgtacttgattaaatcctcaaaagcaaactgttcatgttcttgccgaaaatataggcggtctcacttaacagttatgttgcacaagaaagggaagttataatggcatggaacgtgctctacgtggtattttctagactttactagttcacgagcttttgtggataagtcaaactcttgaatgtcacttaaatgtaatcttttctgtagttgattatgcagagaatacaaaaggtatctgcagaatgtggaattaattttgaaagtttgataaaaacttcagaataatagctgtggctgtacaagtcatctatgaaactgttctctcataggtgacattaatttcctatctacagagttttattactgaatgtgttatgtttgtacccccacaaaactgaaataatagttttctttttttagcagtctatgaaaatgttgaggtttatcttgactgccgctttttaacataaatatttgggcttcattgaattcctaatatgtgatgtcacttggaattctgatagggtccagtaatttggcctgcaaagacatattttaccttaaaatgaaagggatagttgaaatgttattttacacgatagcaaaaaagcatccaacataagttgtgagatttttattgcttaacttttgaaatagaaggacaaggttcttatgtgcttgctttattccaaagtatatatgggaatgctaatgctttatatgtaaaatgtacgctacacatatttgtgattagttaatttttatggctagaaattctagaatcataaaaaagaactaatcttgaatgtcagagcttcacctatttttttaaaaacaatgagaacaaaaaaatcattataatttttatatttaccttgtgtttcacaaaaaggaggttttctttgctgtgctacactgcaagaatatgtcatgttcaaatctctggggctttattaaaaactttaactactgtcttcttatagagattattaagcaaatactaaagatagcatagatgtgtggtctaggcagtatttttctggcaagtagacctaagtgcagaatttaagttctgtaacattaacctgagactaaatcattttattcagggttgtctcctctgtgaacagctttatgttatgacctcatttgctacagcaaatgaaatattaatagatcattgaaaatgcagtaaagttttgatcagatgttataccttcattgtataccaaaccctgcctctcataaaaactttctacttgggtttaaattgaaattatcactcaattttttaaaatcaaacattttctttaagaacatgacaatgtaaacatatttcttacgggaatctttaagttctatatttttcaccaaaaatcatttcagaccatgctagttaaagagttattgaaaaaaaaaagaatctatttagatgagtcaaaaaattaagcaaagtatgttttaaataagttagtgactataaaatttctcaatttgggcatttattttgactgcaagtaacaaaacacctgacaaaagagacttaagtaaatagctctagatatatagttgactcttgaacaatgcaagggttaggactgctgatccccacccagtcgaaaatctgcatataacttttgactgtcccaaaatttaactactaatagcctactgttgaccagaagccttaatgataacataaaaaactgattaaaacatagtttgcatatatatttatactatattcttaccataagtaagctaaagaaaagaaaatctcattaagaaaatcataaggaagagaaaatatatttactattcattaagtggaagtggatcatcataaaagtattcatcctcattatcattatattgagtaagctaagtaggagaagaaagaggaaaggttggccttgctgtctcataagtggcagaggtggaagaaaatctacatgtaagtggatctgcacagttcaaatttattttgttcaagagtccgctgtggatagttgttggcattggtgaaccaatgccaaatataatggcggcatctttgtgattgttttggccttttcaaataactgaaagatgattgctgaagttgtagacatcatgtttagcggaaagaaagagaaaaggagaaggtggcagctctttcaagaaagctaaaatttcctaggaacctccataggagtcccatcatggtgttcccgtggcatctctgagcagttatgtttcatatcacaactcctaggtaaagtaaggcaaaggagaagcaggttagaagtaggcattaagttgccacatgttctaattgtcaccttgtttaccaagtcatgtatgtcttatctttgcttaccaaacaaaatgctctgattttcttgattagccatagtgacacttgcttcttgtctttgaaactgaaagtaataaaccacctcacgccatgtgttattcttccaaaagctaacataattttgattgatttgaaaatatatgatttcatatataaacatatataattatatatatatattagtatctattgctgccactttttacttaagactgatagcatcaatgttaaatagtgtcttttcagaagtattgattattctctctgttgcagatctcttcaaattgattgggtgtctccacggaagccaaatggcatcattcttggatatgatctcctatggaaaacatggtatccatgcgctaaaactcaaaagttagtgcaggatcagagtgatgagctctgcaaggcagtgaggtgtcaaaaacctgaatctatctgtggacacatttgctattcttctgaagctaaggtaagtcttttctaactaatcagtgaaccatgtttttctcactcaagactccaagtgaaattattagcttctcacaccatgatgtattatgatcaatatttccactactctatgaagaagactccacggaaaagaaaggatgcttacaaaaatcactatcaccctcatgagcactttagccttcccattttttattatcttcacaagaaatataaacttattagaatagggtacatcccaaattttatttgattgagtgacttaaaattttctttacaacagatcttttcagctacaaataggtgtttgtttatatggcactgatgagtaactgtgaggaggacattttatgatttgtcagaaatattttagcattatagtcatttgtagattaatgttcatattagatgcggtttagaaatcagatcaataatacagccagacagaggagtttgtaaatgacttttattgacaaacaacacaaaatccttagtttgaaggtagaattttatataatgaaataatgttcctatttggcaacaacagcatcacacattcaatggctaaagctactactaaatttataagatttactgcaaaagaacaccataattaagaaagtgagttactgaagcaatatggatcaaaatacaaattattatggctgacacaaatttagcaggagttatcatctaagaaatgcataaagccagcagttactaactgtgcattttttgatacttagactctaaaattatcattatgcctacatttgacatcattttatgccattaagtatgcacatatttaaatacacacatctgatgaacatatttgtataaaattaaatttgggatttctgagaagaaaaatactaaaataaatttgcccattaaacatatcctccacttaagaaaaacttgggaaaatgttggcaaaatacggaattcacttctcaatttttttctttgcttctattattttaatatttattatctgttacgaagtggacaaagagagaatagttgtataggcatacgaataaatgatttaaagtttgtggagtgcagaaaacaatgtgttccatcaaagtaaaaactgattctggccagaaactgtcatagtagtttaggtgtgtataatggatttgataagtttcaaccctataactttagtggcaaaatcaaagctaagtagagtaaaactagtaaagataatgtttccatttaagtttattctaaaagatcaaaaggtggatgttcttaaaatgttcatattaaattagaatatacctgagatagggtgaagaaaaagtaatgggatgaagaaaaatattaataaagtattaacagaataatatttacctatgtttaggctaaattatttataaaattactcctacctttctttatgctgtgatttcagaaaccgctttttgtaacttttaaaaatttactgaagctttgtaccaaataagtgactggttggtgtaacattcctaaattcagtgaatgacaaagaaccggttagtttaattttaaatcaatttaaaaatgatttagacaaatctactctacaaaaaaaaaaaaatcatacgggtcaccttttatagaaaataaatgtaaattgatgaatagggaagcaaaagttaggctttagaaaacaggcgtgtgcaaatctcaccacatagtcttgaaaagaaacatcacatttggttattcttataatgcaaatgtcataccttattacactaaaacgagacacactatttaatgatgccttaaacaaagtcttatttttattgttgagcttaaagaggcaacacaggtattgcggtaaaagagaataaaggatgtcagttaaatttcaaaaaaaaaattgtaaagttcagtttgggactaggtactaatacacatttcctagcatgaaagattggagagaagtagaaaagagacttgtattgcgggtttaaaagctttttggctaaatcactgtaaacatcaatgtttcccaaaatacttaaacaagctttaccataagattacagccatggttcacaaatcccagtgaacgtaagacctgggggaattgttaaaacctaggatttcatagctctagtcccagagattctgattcagtaggtttagatttggctgtgaaaatttgcatttctaaacatgttcccaggtgtcttagttcgttttcacagtgctataaagaattacctgagactgggtaatttatgaagaaaagaggtttgactcacagttctgcagacttaacaggaagcatgactgggaggcctcaggaaacttacaatcatggcggaaggtgaaggggaagcaaggaccttcttcatgtgatggcaggagggagagagagcgaaggggagagctgccacactcttttaaaccatcaaatctcgtgagaactcactcgcctttagacctacaataaaagtctctttcctacttctctccaatctttcatgctagaaaatatatattcatacctagccccaaatgaaatttacaattttttaaatttaattaacttcttctgttgtctttcactgcaatacctgtgttgcctctttaatcccaacaataagactttgtttaaggcattattaaaattttatataataaaaaatgtatatatttaaatatatctatttttattataaaattttatataataaaagatctatatcttatgtatatatacatatgtgtatgtgtaagatataagatatacatcttatatcttttattatataaaattaaaattttatataataaaataaaagatataaaattaaaattttatataattaaatacatattatattatatagtattataatagagcacaaagcatggttgaagacttcaaaaaagctgcattctatcaaataacatttataaaattcgaatgatcctggaaaatacatttttaaaccaacgaaatatgagtaatatggtctcagatcttctatgccttacaagaaaataattatattacatgagatacagtggtataacactcttaactaaactgatatttctttaaaactgttttcaaactttcaggtttgttgtaacggagtgctctataaccccaagcctggacatcgctgttgtgaagaaaagtatatcccgtttgttctgaattctactggagtttgttgtggtggccgaatacaggaggcacaaccaaatcatcagtgctgctctgggtattacgctagaattctaccaggtgagggttatttccaggtgtactcaaaaactatgggaacctgaaaacataaacacgtggttcatgtcagtgaactatttcaaacacctccctctcaacaaaaattgaaccataaacacatagccaatggcctgctctaaatattgtttcttccttctgctttgttaaaatataagcaaggctaaatattagaaaacgagagaacagaaggaatttacaatatctactacagaaagaaataaatctggagatctggctaactccttttatcttgtggctttttttattaacatgactatatattttcactattaaatatgtgaattgctgactgttccaccccatgaagctgttccccacttcctccatttctaatctgaactacacatgcattgttcttggatagatcgcaactgcaaatttcatttgtctgagaattctaggccactggcaatattctctcatcataagtcaggcaagggaaggaagaatgctgcaaagggtagcaaactggattttttccttcatccctttttagtattagccaacttagctagccattttgctccaaatttcaactacataaaacaatgcctagtgaatataattgggaatgatgctaataataactgccatttttaaagtaccaagtctctcgcaggctctgtattgaagactttacatgggataccttatagaatcttcacaactccaggaaatttgtattatacaaggcagtttacaagtaaggaaactgttttagagaggatcaataacatatccagattcacagatgtgcatagaagtgaaagaactaaaatgtgaatataagtatgtctctcctaaatctatgctcttttgtgtactttactgcctctttaaccaaaaagcatcaacctcttttgacaatttttttaaaaggactatttaagacttctaaacttcttcattactaccactgtcagttacaatttatcctgcaaaagtaattgagaatacaaaagtaattgagaatacaaacttttttctactacttaagtttgatactgatatcttctttaaagagcaggaaatggatataggagaaagacaagaaagccaagttttttggaggccataggaaagctgaatactttgagatatctagtttagggtgaaatttatgcccaacgtctggttcctgtaaattatgttcagtataactatatccatccaaggcatgtgaaatgagacactgtctaacccagtgtctgttttgcaaaatactggagcaaatatagaaggcgtgcaatcacctgatgggttcatcttgcccattgcacagatagagccaatttaccaaaacagtggtattgcaacagagaaagagcttaataaatgcagagccagctaagcagaacaggaggttttactcaaaacagtctcccagaaaattcaaaacctagggtctgtctgggcacggtggctcatgcctgtaatcccagcactttgggaggctgaggcgggtggatcacctgaagtcgggagatcaagaccagcctggccaacatggctaaaccccatctcttgtaaaaaatacaaaaaattaactgggcgtgtggcaggctcctgtaatcccagcttctcgggaggctgaagcaggagaattgcttgaatctgggaggcagaggttgcggtgagccgagatggtgccactgcactccaacctgggcaacagagtaagactctgtctcaaaaaaaaaaaaaaaaaaaaaccctaggggtttttttggttggttttttgtttgtttttgttttttgtttgtttttttatttgtttgtttgttttgagatggagttttgctcttgttgcccaggctggagtgcaatggcgtgatctccggctcactgcaacctccacctcccaggttcaagcgattctcctgcctcagcctcccaagtagctggaattacaggcatgtgccaccacacccggctaattttgtattttcagtagagacaggctttctccatgttggtcagggtggtctcgaactcccaacctcaaatgtctgcccaccttggcctcccaaagtgctgggattacaggtgtgagacaccacacctggcccagcctagggttttttttaggatagtgcagtaggcatagggctagggaatgaggaatgcttattggttggggataaaattatagggagtcagagctgtcttcttgtccttagtcagttcctggatggggactataggatcagatgagccagtttactggtctgggtgatactagctggtccctcagaataaagagtgtgaaaaatagctggtccctcagaataaagagtgtgaaaaatacgttgaacaccaatcttaggttttacaatagtgatgttatctatggaagcagttgggaaggttaggaatcatgtggcctctggtgccatgaacacctaagccgtagttccttgtggctaatttgttaattttataaaggtgctctgccccccaagcaaggagcaagtttgtttcaggaaaggactatcatcagtgtttcgaagttaaactaaacacctctcatagttatcttggcctatgcccaggaatggacagggtagcttgtaggctagaagcaagatggaattggttaggtcacatttctttcactgtcataattttccagtgtcaggattttcttactgtcataatttttgcaaaggtggtttcaggtgtcctgattaaatactgctcaagttttctcaaggcagagaaccttcactcattatttttccttataattaatagaaaaaaaaagtttgtatagcagtgctgttatttcttattctctatcaaaaatatttcaaaattgaataagttctagtaaaccagattttccacttaagaaaaagtaaaaatatatatggaaataaggattttgtagaaaactgttaaacttcttcatactacagctcacgatgtcaacaatggatcaaatactgttaaatgctttactttctcgaagtaacttaaatttggggagttttcatgtatgattcatatctgcccttgattacaaatcattgctataaaattataattacagtgatcagatggacgttttgtgttgttcaattcctaccattcttcacaccagtagaccaagttgatcatggaactaagtaatagtgttttcatttccacatcacattaaaatttttatgttatgatttgcaacaaactattcaaactctacaaaatatcctctgtcccttaaaactaatgaaaaattcttagttacatcttcactgctgctaactcaggagactggcctgtgactttctcaatgctaacataagtagtcagattttgaaccgacagcacaatctacttttgttaggtttcaaaataaaatttaacatttttcttaaaaatgaaataactcatggaagctcagaagttgtcattgatattatataagcctttaataattaatttttagaccaaggatttaaaaaatatgtattgtctgtatgtataaatacatgtttctgcacacctaaagcattttaatatctaccaaaccattgagcatgccccaaattttgattcttttttaaatagttcatttttcatagcattagaatgcataccctggtgtcaagaaaaaaggaaaaaagcaatctcatgaaataatcaaagagtgttttgctccaatcattaatcccactgtacctaaatgaagagattattttgtgacctctgtcctcagccccgtggtctttgttagctagtttaacactggttacactgagggggaaaaaagcgcaatggtcccaaatcctgttgcatctaaatgtgatttaaatctggtcactagtctgccagttcaaggccaagatgggtataggcattttgatatttatggattagcctgaaatattggtaaatacgtactttattttttttctcatgactttcttccataacaccccataacaaacagcagaagaggaaagaatgctcatttctctcccttttttaataaatatgctaataaccccaagtaaatgttaatgtgggtcattctttgataagaataacaattaactgttagactgcatggtagtttttagagagaaaacattttcaagcctggcctgaaatagattcattttgagaggttaatgagaaggtgactgatccttgtatcttatgtctaatagcccctttttgaggaaaaaaaaatagttttattttttattgatataatccacatctttttttttttgaagacttttcttctgtcagtaactaaataagattctgagggattcagaaagacatagctaaaatatctaaaccaattaacatttattatgctcaaaagaggctttaaaaaaaagtattggctttcgccatgtagatgtgtatactatgtttcctctaagctcaccattgtcctgagtggtgtttaattaactgttgttgccctgtaccatgggatacattatcttaaagtttaccatagagggacattatgttctttgactgtgaagacaaaaaatatggcaactacatttcagacgaaatagaattattttacccaggggaagataacaaatacagtaactttactgtttacaataagctcgttgctccttcattggtctctggtagcatcatcatggaaacttttactaagttccctttttcttagagataccatattataggatcctttcaaagataattgactaagccaactgtctcctgaattctagaaattcatattttgagaaaatcctgagtatgtcttgatccggtcctggatatttaccctagagaaaagcaaatttatgtttacacaaaaacctgtacatgagggtttacagcagctgtaatcattactgccaaaacctggaaacaattcaaatgtccctaagtgagtaaatggacaaatgtggaacaaaggaatactatgtagcaataaaaaagaacaaagtattgataagtgccaagaagatatcaagcccagtgaaagaagccagtctcaaaaagctaccaactgtgagactgcatttacatgacatactatacaagacaaaccatagttttggagaaaaaagttgacaattgccaagggtaatggatgggaagggaatgtgactatacagggatagcgtgagggtgttctgtgggggtgatgaaactcttttgtatcctgatggtgtttcttcattaaaattcatggaagtgtgcacccaaaaaaactaatggtcctgaataatatttttaaatgaaatatttttaaaacactatttccattttacacataggaaaaatgggacatagaaacatgaccaagacactcagctagtcaaaataggaattttcatggttaaattttaggttgagctcctagagatggtgtgttttataataatgtgatgactgtgtatgagtgacttaatatatttttctcatatgttagtagaacagtaagatagcaaatatatttccattaaaattacaatgaacatccctatctttaaaagaaagcaaaaatgtcttagtcagtgatgactatttcaagtaatattttacatgatcacattcttatgaaagcataagttttgtgtagtgtttccgtggtttgatgctgaataattagtgaataagatattggttctggagtcaaactgcctggctccatatcccatttctttcacctcttagttgtttgaccttcattaagtaactttaggaatattagcagggtattaatgtttctgatgtccattgggctgctgagttagaatactcaaagctaaccctatcttttatatctaaatagaaaaaaaatgtttagtaattgaggagcatatgagtaaagagggctaacaggcctcctttaaatgacaaagtttctaatgaatctttccagagcaaggactcaggggtgtccactttcatcagatcatgtaaagggatagccagttcccaaaagctaagattcaaacatctaatgacctttgagatcctatgaaacaaaggatccttgttgatcctatgaggccaagcaattctctaagttgacttttagcaactagccagggaaagtcatgaagagcttccaaactttgaagagaaaaagactttccattttgcaaaatgtcacagcctagaatttaggtcctagaaaaagcattttgttctgacaaaattgacatttagagactttatgtcgattgtatgctaccactattgacaaatagagggaatcaatttttcaagtctatctggagaacgtgacagatgatcattcacatattgcacaacagttgaatcttataggggaaattaaatatcgctcagtttgtttcctattgctgctataaatcatgaccagacacttcgtggcttaaaaccacacaaacttactttatacatccaaatatcaaaagtttgaaatgggtctcattgaactaaaactaagaagttaacaagagctgcattcccttctggaggagagaatccattttcttgccttttccaccttgcagaggctgctcacattctttggcttgtggaccccttccattttccaggccagcaatgaccagttgagcctttctcacttcatattattaaacttaatcacatctgttgtcttcattcccctttgccatgtaacataacatagtcacaggttccagggattaggatgtggacatcttagggaggccatgttgtgcttaccatggtaaggtaatggttaagcagttgtgagaattaagaaagcattgtcgtaaactcttggggaataactgtcacaagtgaaacaaaaaaagatactgtgagcctgagtgcaagaatatatgaaaaaaatgctaagtatagatttgctataaattaagcagctgcctcagggagtggcagtaggatgatattagggttgggaactacagggaaatgggggagtgcaatcttgttaatgacacttaaatcttgtacaaagtggtacacaagtcttttatcattttgatagagtgaacagtgaactacaaggactggtacaggggataatggggtgttatgccaagcgaggtaactttctagaggtatgtagatacaatggaccaagttattaaatattgttctttttagtagattttgggacagtttcaagaaatgcatagccagattgatagacatctttaaggggttagcatcctgtatgaatcccacatctgagcagtttttgccccagaggatcttggagacacattcaaagtcagagatgttgataacaaaggcatcaggtaattagctggtgctaccaccaaattataggccaggcattcttctcctgggagttacagaaagagactttcaggtgcacatttaatgctggtatctcatttacaaagtggatctcttctcaacagatgcactgaagtggaattactaaacaaaaaatatgttgattcaagagaaagaaaagaaaaataaaggcagaatctgaaaattatttgatatgtgtaccgctgagacatttggttattcctagaaagggataatggaaaattagaagggtttttgatagataatatacctaccaccagtatcaatcttctatttttacaattgcatagaaatttctcactttctatgtcaagggcagttatggatagatgagagcagctactttcacagagaggtgctgttttgtcagtttgtccttttttttttttttttttgattgtgtctttctaagatacactaataaaggcaaagtaggtgttctcccagtgtcccttacaatattgaaagttgtttttgtgcagactagacatagaggtgccctcattcttggctttatctaattgcttaatcccaaaagctgttaatgtggtctgaattttttttctttttttctgagccaaagtatcttctaagtgcttagcaagctcttgtaatttagaaggaagggacaatctactgtcttatcttctgttttatgggaagttatgataccttcttcactgatctttagagtattctggaaggtggtagttaagtgatctctgaagccaggcatggatttattttttccttgtttacaggacttttttgtggtaaagtatacaccacataaaatttatcattttaaccattttttaagcacacaattcagtggcattgagtgcatttgcattgttgtacaatcattaccaccatccatctctagagctcttttatcttctcaagctcagactctgtttccattaagcactaactttccactccctgttatcttcaacccctggaaaccaccattctgtttttggtctctatgaatttgactactctaggtacctaatataattggaatcatacaatatttgtctttttgtgtctggcttatttcacttagtgcattttctttcttttttttttattatactttaagttttagggtacatgtgcacaacgtgcaggttagttacatatatatacatgtgccatgttggtatgttgcacccattaactcgtcatttaacattaggtatatctcctaatcctatccctcccccatctccccaccccacaacaggcccctgtgtgtaatgttccccttcctgtgtccatgtgttctcattgttcaattcccacctatgagtgacaacatacggtgtttggttctttgtccttgcgatagtttgccgagaatgacggtttccagcttcatccatgtccctacaaagaacatgaactcatcattttttatggctgcatagtattccatggtgtatatgtgccacattttcttaatcctgtctatcattgttggacatttgggttggttccaagtctttgctattgtgaatagtgccgcaataaacatacgtgtgcatgtgtctttatagcagcatgatttacaatcctttgagtatgtacccagtaatgggatggctgggtcaaatggtatttctagttcaagatccctgaggaatcgccacactgacttccacaatggttgaactagtttacagtcccactaacagtgtgaaagtgttcctatttctccacatcctctccagcacctgttgtttcctgactttttaatgatcgccattctaactggtgtgagatagtatctcattgtggttttgacttgcatttctctgatgcccagtgatgatgagcattttttcatgtatcttttgtctgcataaatgtcttcttttgagaagtgtctgttcatatccttcacccactttttgatggggttgtttgttttttcttgtaaatttgtttgagttcattgtagattctggatattagccctttgtcagatgagtagattgcaaaagttttctcccattctgtaggttgcctgttcactctgatggtagttttttttgctgtgcagaagctcttgagtttaattagatcccatttgtcaattttggcttttgttgccattgcttttggtgttttagacatgaagtccttgcccatgcctatgtcctgaatggtattgcctaggttttcttctagggtttttatggttttaggtctaacatttaagtctttgatccatcttgaattgatttttgtataaggtgtaaggaagggatccagtttcagctttctacatatggctagccagttttcccagcaccatttattaaatagggaatccttttcccatttcttgtttttgtcaggtttgtcaaagatcagatagttgtagatatgtggcattatttctgagggctctgttctgttcctttggtttatatctctgttttggtaccagtaccatgctgttttggttactgtagccttgtagtctagtttgaagtcaggtagcgtgatgcctccagcttttttcttttggcttaggattgacttggcagtgtgggctcttttttgggtccatatgaattttaaagtagttttttccaattctgtgaagaaagtcattggtagcttgatggggatggcattgaatctgtaaattaccttgggcggtatggccattttcgtgatattgattcttcctacccatgagcatggaatgttcttccatttgtttgtatcctcttttatttcattgagcagtgctttgtagttctccttgaagaggtccttcacatcccttgtaagttggattcctaggtattttattctctttgaagcaattgtgaatgggagttcactcatgatttggctctctacttgtctgttattggtgtataagaatgcttgtgatttttgcacattgatgttgtatcctgaggctttgctgaagttgcctatcagcttaaggagattttgggctgagatgatggggttttctagatatacaatcatgtcatctgcaaacagggacaatttgacttcctcttttcctaattgaataccttttatttccttctcctgcctggttgccctggccagaacttccaaccctatgttgaataggagtggtgagagagggcatccctgtcttgtgcccgttttcaaagggaatgcttccagtttttgcccattcagtatgatattggttgtgggtttgtcatagatagctcttattattttgagatacatcccatcaatacctaatttattgagagtttttagcatgaagcgttgttgaattttgtcaaaggccttttctgcatctattgacataatcatgtggtttttgtcgctggttctgtttatatgctggattatgtttattgatttgtgtatgttcccattcatgttgtcgtacgtgtcaggattttattcctttttaaggtcgaataatgtctcattgtatgtatataacacttttgtattcatttattcatcagcggacattggggttatttctgcctagtgactattatggttaaagctgccataaacattgatgtagaaatgtacaaatttctgttcaatctcctgttttcaattcttttgggtttatacccagaagtggaattgctggatcatatggtaattctatgtttaattttcatgttaagaactgccatactgttttgtggaacattttaacattttatattcccaacaacgcataagtgtgccaatttctccatattcttactgtttattattttatgttttttataactatcctaatgagtatcaagtggtatctcattgtggttttgatttgcatttccctacttattactaatattgagtatattttcatgtgtttattggctatttgtatgtcttctttggaaaaaagtgtctattaaagttatttgcccatttaaaaaataaggtctttgtttcatgtttttgagttatagaagttctttatacattctggatactacttccttatcagatatataattttaatatattttctcatgagttgccttttcactttgttgacagtgttctttgatgccaaaaagttattaatattaattatgatgaatccaattcatcttttttccttattgcttctgctttcagtgtcatagccaagaaatcattggcagacccaatgtcatgaaatttcccctttgctttcgtctaagaattgtaagttttagcttttacatctagatctttgatccattttgagttagttttggtatatggtataaagtaagggttcaatatcattctttggcatgtggatattcaacttttccaacattctttaaaaaaaaaaaaaggtcctttcctcattaaatggtcttggcacttttgttgaaaatcatttgcccatatatgcaagggttcatttttaggatctctgttctatcccattggtctatgtgtctgtctttgtaccagtaacacacttttgattactgtaactttgtagtaagttttgaaatcagaaagtgggagatctccaactttgttctttttcaatgttgttttgactatttgcagttttttgagattccatgtgaattttataatggcttcttctgcttctgcaaaaagcattgggattttgatagggattgaattgattctgtagatcacttgagcagtactggcaccttaacaacattaaggctcccagtccataaacatgggatgttcttccatttggttatcttctttaatttctttcaacaacattttgtagtatttcagtctttcgctttcttggtaagctcattcttaagtctttctttttttgatgttattgtaaatgaaattatcttattaattttattttcatgttgttcattcttagtgtatagaaacatacctagtttttctatgctgactttgtatcttgatactgtgctgaattgtttattagttgtaacaggttttttttttttttagaatctttatagttttctctatatgatatcatgttgtctgagaacacatagttttgcttcttccctttcaatttagatgccttttatttttttctcttgcctattgctctagccataatatccaatattatgtagaatacaagtggcaaagggtggcaaccttttcttgtttctgattttagaggaaaagttttccgtctttcactgttgagtatgacattaggtataggtttttctcatatactcttgattatgttgaagtagttttcatctattcctattttcttgagtggatttataatgaaagagattgaattttgtcaaatatttgttctacatcaactgagataatcatgtgtttcttttttttcccctttgttctattgatataatgtgttacattgattaaattttcatatattgacccatcctggtattccagggatatatcccgcttggtcatgttgcagaatcattttgatgtgcttttgaattcagtttgctagtattttgttgaagatttttgcatcaatattcatgagagctattgattttaacttttttcttgtggtttctttggtaagttgtatgtttctagtaatttgctcatttcatctagtgagatggatttttggccaataaatttggaaagaaaagatctcaaggatagctgctgagagttattgtcttattatttatactccttatatatctatgtttaattaaatattgtcccatatttttatatcattttggtaaacagtacatcttgcttttactaaacaaattttaggatatccagggctcaccaaaaggtgaactaattgagaagaagtccaggactataaatccctaaggcagtcctaaattcttcagtggatttgtgccatttcttaagaaagcttgacaagtcattaattggattatagaaatcttacctggaccatggttgaaggccataagacccatcagattggtcatcatactcacataccttataagatataatgaagagatgttgtccaggggaaaagatatgttcaagaaagaacggtagagaaaagggaagaaggtctgttgaaggtgtaggaagaagaggaggagcaggacaaaagagagaaggaagtcagggttccgaaggccacgagggaagacaaccacagtggggtcatgagatagagaagagaaatgaagcttggatttcagatccaccaagtttttattagttcttttgaaggtatccttaagggaagccatttacaaaatcttctgtcctttagagttgtctttataccaaacaaacaaacaagctaactcttggtatttagagtatttgagtcctttgattttaaggtaccaggcaaaagattatctaattctgttttttgttttttttgtttgtttgtttttgttttttagatatgcccaggctggagtgcagtgaaacaatcctggctcactgcgcactctgcctcccgcctcccgggttcaagcaattctcgtgcctcagcctctcgagtaggtgggactacaggcatgcaccaccaagcctggataatttttttatttttagtagagatggggtttcaccatgttggccaggctggtcttgaactcctggcctcaagttatccacccacctaggcctcccaaagtgttgggattacaggtgtaaagcaccacacctggtggattatcttattcttatcccaaatttcccagactgtcatgtgaagagaaatgtagtaaaattcagtgtgtgacatagcccagagaagtactagcacactgacttaaatacagtattttttacctcctctcatgtaattaaccttcccaatgggagtattttgtttggttgaacaaatatagtttggtcaaggaaattatagtcataagcaatataaatttatcaatagttggtttttgaatccactctacgttccaaaagaaaattacacagaacaaaaaagtattcctagatgtttttctataatgccacatagtccatgtcaccagacctgatggtgaggaaatagacaacatagacttacctgtaagttgccatgtgtgtatctgatctgacacacgtttatacacaaaaactttggagtcatttggaaattttgcaactccaatatgatattattctctttagtaattctgtcaatcagttgggatctgcaagatgattgtgataaaagttaattgttagtcatagcatatttttttaactgatgtaatgattattattgtcctaaattgacaggtgaagtatgctgtccagatgaacagcacaatcgggtttctgttggcattggtgattcctgctgtggcagaatgccgtactccacctcaggaaaccagatttgctgtgctgggaggcttcatgatggccatggccagaagtgctgtggcagacagattgtgagcaacgatttagagtgttgtggtggagaagaaggagtggtgtacaatcgccttccaggtaaggggcccaggtctacctttcagtagatggaggatctgagaagcagagagagtgagaaatttgccctagaaataaaacaaataagtaattaaagctcacattggttatatctaatgcaataattaggaacatattgtttaacacataacaatgtaatctcccaatttttacatgtatctcatgtatttcataaaaacgcatcaattttttttcctcttgaaaaggtcatgtcctccaaaaaaaattccacacatgaatgcattggttatgaatgaaaagaatatttcctagcaaatagtatacaaaattattataatgatattttgttataattcttttactcccttattctactgtattaagctaacactaatataaataacaataagtatcattgaatgaatactaacagacactgtgccaatattttatatattattacctcaaataatcttcacaataatcttacatgataggtactatcaattatctgcattttaaaaatgaagaaactgaagttcagacattagatattagacattatcttgctaaataccacacagtcagatccagattttgggaagcctgacatttatgttattggaggtggggcttttaaagacaagaaaattaaaatatgaagttaatgttcacagtatcttcaccaggcatagattccatctcaagaagccactttctttgctcctccctaagaagcaactcctcatctgttagttttatgattgcagcaattcagttacctcttcaggcttcacttctcattccagttctcttgctatttccactgcatctgcagttatttttcccattttgagtctaaaaccccttagtcatccatgagggttggaatcaacttcctctaaactcctgttaatgttgatattttgacttcttcccatgaatcatgaatattcttaattgcatctagaatggtgaatcctttccaggttttcaatttactttgtccagatccatcagaggaattactatctatggcagctatagccttacaaaatgtatttttaaataataaaactggaaagtcaaaatgactacttgacctatgctgtgttaataggcatgtaaacattaattttcttgtctatttccatcagagctcttgagtgaccagatgaattgtcagtgagtattaatattttaaaagaaatatcttttttctgagcagtaggtctcaataatgagcttaaaatacatagtaaaccatattgtaaacagatatgtaatcatacagcctttttgttccatttacaagcacaagcagaatagatttagcataattattaagggccctagagtttttgcagtggtcaatgagcatgggcttccacttaaagtcaccagctgctttagccccccagcaggagagtcaacctgtcctttgaaactttgaaaccaggcgttgactttttccctctacctatgaaagctctagttggcatcttcttccagtacaaggctatttcatctacaatgaagatctgttgtttagtgtagccaccttcatcagtgatcttacctaggtgttctgggtaacttgaggcagcagtttctacatcagcacttgctgcttcaccttgcacttttatgttatgaagatggctttttttcttaaacctcatgaaccaacttctgttagctttcatctattcttctgcagcttcctcatctctctcagccttcatagaattaaagagagtaagagccttgcctggactaggctttggcctaagggactattgtgactgatttgatcttctatccagaccactcaaagtgtcttcatatcagcaataaggctgtttcacttattcataagtgaatgataagtgaaatagaaatcttacctggaccacggttgaaggccataagacccacaagatttgtcatcattctcacataccttataagatataataaagagatactgtccaggggaaaagatatgttcaagaaggaatggtacagaaaagagaagaaggtctgttgaaggtgtgggaggaagaggagcattttgattttcttcaagaactgttcctttgcatgcataactgggctaactgttgggcatgagaggtctagtttttggcctgtcttggctttccacatgccttcctcaataagcttaatcattcctagcttttgatttaaagtgagagacatgagactcttcctttcacttgaacacttagaggctattgtaaggtaattaattggcctaattttaatattgctgtgcctcagagaataggaaggcctgaggagagggagaaagataaaggaacggctggtctgtgaaacagtcagaacacacaggacgctcatcaactaagctttccgtcttatatgggcaaggttcatgacacgctaaaacaattaccatagtaacatcaaaggtcattgaccacaaatataaatataaaatataaaaattaaaaatataaaaatataacaaatataataataatgaaaaagtttaaaatattgtgagaatcatcaaaatgtgacagagacacgaagcgaacacgtgctattggaaaattggcaccaatagacttcttgatgcagggtggccacaaaacttcaatttgtaaaaaaatgcagtctctgcaaagtgcagtaaatcaaagcacaataacgtgaagtaagcctgtgatactaaactactatatgcctttttaactcttattctctcctatgtgtacagcagagcttttcagatgttacatggcatgatttgcaacagatcgaatgcagactcagaaagaaaattaaattgacttctcttaactaaacatttaaaaagcttgcaaaaatataacacaatgtcattcttctattttttatttgaaaaacatttattttcataaatatgttagaatgttatagatttattattttatgtctaaatgcattaataaatatttcaaaaatttctgccgtaagttttaacacagtacatatcaacaggtaaaacccatataaacaaaaggtatttggggtcctcaataattcgtaagcgtataaaaggatcctgagaccataatttgagaaccactgcttaaagtcatagtaacgtctactagaaaattatggcaactaattagttatcctgtactatgactaaccagttgaatacctcctcctcctttagatgaagtagctaataacaggtctattaaagatagaaccaaggtggcagggagggtgcaaaagtgttacctcctgtgtactctaatacatcagagtttaaaaatgacagcaaaatatttgattttagtgtgtttgttcatctgtagctttttaaaagaattagtcaactgctatactccgtcctttgttaaatatgtattatgtagtaaccatattcaagacatcattcttggtgctttgcaagtgtaaaaatggccaagattccgtttttatcctcaagaacttacaacctaatcaaggagaaaagtgcctacaaggttatacacagaccataagagagggatgaatgcatgcatattcttaagacggagagatcactccagtcaaggtaatgaagggggttgttccattggattggaatctcaaacagtgagtatgattttggcaggtgtggcttgagctaaactgtgaaattagcaatctgcaaaacacaaataatagcgtgtgctttggtttacaggaggtatacactctgtgtaaggaagaaaggagataaatctgagtaggcaaaaggatttgaacattatttagcactcagggaagagtcaatatgatgataagaactgtagtttaagattaaatttaggtgtcagaacaaatacaatagagaaggaaagagaagtcagaacacccctggcatgaagtaaaatacatctgttctaagaagtggaatggaggttaccgtccactaggacaatggttcttaacttgttttccttttgaatcttttggaagttacaaaccctcactctgaataatagtgcatggaatatacacaaaaatttgcctgtaattttatccacccttgaactccatccatgaactcaaatttcagaatcacttctttatttactccaagatgatgtcgcatgccagtcaaacatttcttacacaaatggtgacagccctcaactcttgcgaatcaagataagctctagagtttctcatggcattctacagctctgccaactctgataatcatagtggacttaaggaataatagttttacaaaggaaaaaatatatctttttattctcttgactttctttctgcaggttgcactgaaaatagacagattccacatgtatttttcctctctctgctgccgttcactcctgtagcccctaatgactgtgaccttaatgaccttccagaatatccatatggccctttttctcctcaacctagcaacaaacagcatacctgctacataagtgtttggatctcataatatcgttcctaagcctggcctctctcgctgcctggcattgtgtgcctgccacgagaccgggctggctcgtaaaacatctctttatgtactttattacttaaactcttttatttgcctgcaggagccctttaacaaaatcacattgaattgactttctcacaccaaatcaaatctccctggtcccagttcagttgtctttgtcaatatgtattttataaatggagtgaattaacagatgctgttggaacagaagtgctggggtggcgtttatgtttttagtgctctctctgggcagatgcgttgtgtagaagtgttatacaggtatctcgggatgaaagtcatgcgtgtcatttcagtggatatgtattcttagccattttctttgaatagattttaaacctatttattactcatttttttcttagtgtttgcttatatagctttatcatttatgccattaatcttggattggacttgattatatcccttagtatgaaaaggtgaaaaattaaaacctccgtttcattcaaagaggacagatttttctattagccatgggaaactgatcatgagatgactttggaatatattgacttatttatattataaactttgtccatgcggcctttgatgtgaaactctgagttgaaattgtttcagaatacaagactgagttttcatgtcctggactctgacttcagtagaacaaatgactatcgctgtttgtttcataagatgggaatttgggaattttgcagagggaagtataattacagaagtccatggtgtaagggtggcattgaaaaaacatttccctggaagatttccataaaacagaatgattttttttttgaaaagtgtaatatatcagtgctataaaatgtatcacaatgatttggggagcatttttactctaccctctgttttgtggtggtagtcacagagccatctactggtgaagacaagtgtgaatttcttttctttcatgctctgccacaaatgttatacatttgtcctaaggatgactaatcacaaaccttttttttcttctaggcctaaaatatcccttggcttaaaatttggtccccatgaacaatctcagagtttcacaatgatttgtcatattccagactggattttactactatactatttttatctcaaaggcatgatacataattcttggtcttctttaaaaaaaagtggaatcccagttttgcagtcttaactatttagaaattcatccaacagatatgcttataaatgcttttctttttagacatagatatgaaataagcattggtaacatatttgaagtattaataatattgtgagtaaaaattttttcctccactattttctcagttgtgtccaatcaatggaaaccattggatatatatacagtttagaaagacaatatatgctttttcatctgaaaaataaacacctactagtttaatgtgtactgtaccactttactaacatctgcattttgttcaaagacacactccaccttttgtacaaatttaatgaagaggctctggaagaatggaccaatccatcaataatgcatgacctattttgtttttctttgggcatatttaaaatcgtgcattccgtgtgtcaaagttcaaaagtcaagtgctacatgtgataaattaggtaggggtcgaaagttattgcaatgcagtttcggaagattgtctgtctctgaatttgcagctcattcatgctgaagtgatgcactatgggaattactaccaaactctgctccgcaacatctgctctccctaagtgagttagtgcacgtcagacatctttatgtcagaatattgcagtgatggatgcagtcttcagaaaatgctgcataaaaatctggtgtgccgttctggccattaagtgaaattactatttaaattaatggcactgtcacagtttatctgtgcaaagaatgaacgctgattagggtattaagtaattagcaatttatcacactggaacaaggttgataataattaaagaagtaatggtttaccaaagaatctaaaaagggagtcacttcttgttatgtgagtgaaatcttggctgaaaatttcaattcagtaatacaaagatgaagctctttgtgaaagaaggcatcttttttttctagtttaaaaacagttcattatcaaaattttagttgacctgtcagaagtccctcagagtgatcagatgactgattaggagtttcaaattaggtcaatgtctgcatttttattttatacttaaagcatagtgaaaccatgaagtaatttgggaatgagagggggagaatatattccgctccctaaagggccagttttcaaattttgattgctctttaaaagagaaacatgaattgtcttcagaaaactgccagagaaaaaattaacagtaaaaaaatccatggttgtatttaaatgtctaatcagaaggggcagaaaaatgcccgaacaatataaaacttgaagctacggatttttctttttagtttatgtgtgtgtgtacactcatgtatgtatatatttatatgtatttgtgtgtgtatatatacacatacatatgcatacatacatagctacacacacataaatatgtgtatttgggtatgtacttatacatacacacatatatacccaccataatccagactcagactaaaatgagccctgctctttgtattaatttgagataacttttcctagaaatgttaaaaccactaaaattataaatatagcagttaatttgtaaaccaattacttcgaagagttatcacattagataaacatggtatgccaaagctctgttagaatcagtgtatatcattaatcataaataagagtttttaatattagagacttttgtaagtaaaaagatgaatgagagggttctttggagtcatgtgtggataaacatctttcttaaggcatgtgccaaaccaatgtctactttcaatgattttttttaaaagcacttttgatcttttatttgagtgtctttaataatgtagatgtttacacaggaccagattaaacaattcaggaccccagggcactttgaatttgaggttctttatgttatcagtcggaactaataataaacaaacaaaattccaattaaaataaatcattcatcacattgtgctgctatataactggatataaattctaatataaaaacactgtgacatgcagtatagccaccttgatttctagcttgatctgtctctagagtagtgttaatttattcctgctttaatgttaaaatttctgccatttctctttgatggcaatatctaaatgatgcaaatgcaggtaattaaactaaatttggtgggagaaaatgtctatttggtatctcaggtacgtgtgtctttcgtttagatgtggggatcagtgatcctctctacaaggtctttctgcggctgcccccagcctgtcacctgtgtctgtgatgggtctagaacagagtgaggctcaaaaaatagtggctgattagtgcacctgatcagtgaacatgctcagctgattatgaataaataccaaatccatctcatgcagaaaacatggttaccattgcagctaaattcacaagaaacaaatatttgtaccctaaataaagctaagccaaaacttgcactgcttctcccgcagggcttccagttctaggatggtgctacctttccactctgcctgggcttttatcccagagtacttgggtgaccttttctcccttatgaatttctagagctttctcagagtccctatagtttaactaaccttcttctgcaacaagatgttatcatcacaaaatgcgcaggcagttttcatgacagaaatcctatctctttttatggagcatgagagaagtttggcccagctgaatgattttcgaacatttcctcttgtgtgttcttttcctaattagtgtctagtgctcttggtaagaaggaccctcactgcacatttaaatcaccttggtagggaaatgctaccttaggtattgcaccatttcagcaactgcctgagcctgacatttttataccaaactttatagcagcctcagttttcttccctttttctatttcatattcatatataacattttattgttgcaggtatgttctgttgtgggcaggattatgtgaatatgtcagataccatatgctgctcagcttccagtggagagtctaaagcacatattaaaaagaatgacccggtgccagtaaaatgctgtgagactgaacttattccaaagagccagaaatgctgtaatggagttggatataatcctttgaaatatgtttgctctgacaagatttcaactggaatgatgatgaaggtaattgatagaaaagctctcggaggcgctgatttgacaatggaaagagaaatacattgttcataactatttttctaaaataggaatataaaaactcctgtgtgcattattcattttcacattacatccatattaataccgaatgagttcgctatgattgatgttattgcaatgaattctaaaggaattaataatgattagctgttctcagggaagctttacccagcacttcagattagtgcaggactgaaagtctgtgtgccactgaaagagccagcacaggtcgtctggggcctctgcatggtgccatttcatgcctgggagcactgtggatggaggcaggaggaaattcccgcttcttctccctagcccgccagccatcatccaccactttcctttgatagagaccttagatccagcaaattcgcttagttgcatttatatcatattcccttggacaatgcaagatgagcaaatgcctgtgtcaaaagtgaatgaataggcttctgggtgtaatcgcttatgtttttgtatggtgatggtttgtacacagccatgtcatgtatgtgggtattaaacttgacccaggataccagaagcctatcaatttaaggaaaggaccatggacactttaaaaataaacatgctaccgtgttctgtagtaatttgtcattataagaccactaaaaatgggtgtcttggtcacagacaatggaaggacgcttgttcaatgaggcaactacacagtccttgtgtagaccacatacactttgtacactttgggatgtaaaataactcatgagattgttagaagccctgcaagcactttgtatcaatgaatgattaagataacacataaggttggttaaattattctaatgaggacaatatttctccatgctgaatcaagtagtgtgtatacataataatgttcagtctgtaggtttcattttgttttctgaagacctaccacctggagacatttatatcctgttccagtctggaatggatcaccatgggatttttacatagctggcccattcggtcttccctaagctatcaattcaggaattccttttacctctttcctgtgttgattcccctgtttttttgttttgttttgttttgttttgttttgttttggattccaagtttcattccatttggagaattatcttcttgtatatagatgtatggagggtaaattttttaaaagcttaatgtataaaaatactattattttaccctccaacaggattgatagtttggtctgatatacaattccaggttaaaaattatgtctactcagaattttgaggcatttctgcatgttttaagcttccattaatattttgattcctatctctctgttggtaaccatgtttcttttcctatgaaagctcttgaagatgttctctttatcctgctcctctaaaatttcatgacaatgaacctctatgtggaagttaggatggtttctttttgcattttgttttccatttttgtgatgagagcatttaggatctactctcttagcaattttttttttacattacaattcattatgagttaggcagttgtcttccaagtaacatctctagaaccgaagccccttacatcttgtgatgcttcatgcagcccttggatcataatggaaaaggcgcaagaggggacaattgcacacagacagttcctacctggatatagagtacatcctttctatgcactagtcacacagacatatctagtcaggtggcttctcctactgcagccaggtttcaacatcccatgttcccagagagaaaagggaaacatggacatcactgagcacattgcattgtctctgccacattcatctactttccagcttccaaaaaggtatgcactgtcttgtgtgtattatttttctccattttttcttagactttcaacacgtaaaccagtattttactgtcatttagttgggcttttagaggatagatagatagatatagatagatagatacacacacatacacacacacacatatatatatagtgggattctatttatgtagtgtcatcttggctcactgcaacctctacctgctaggttcaagcgattctcctccctcaacctgccaagtagctgggattacaggtgtgcgccaccaagcccagctaatttttgtttttttagtagtgacagggtttcgccatgttgatcggtctggtctcgaaatcctgacctcaagtgatccacccacctccgcctcccaaagtgttgggattatagacatgagccactgcgcccagacccactatatatttttgaatgtactattttgatcaacttggtaagaataattcaacttattttatgtaagagagaggctgaatggagatcaattttaatagcaaaaagtattctaaatacattatgctacttatgtaaaggaaaggcaaagtagatctccacattataaaactattaccttacttatagctcttgtagtgtgggatgattaagtatttaatttccttggattaaaacaaagtggtacttatcaaaaaccataaaaaatctggagatgtgtcagagaaaatgtttataagcgtaaataattataattacaatgacagttcatgaaacatttatatttttaaaaacttggatcagtaatacttctaatgggaccaacttccccaacaacacaggaagtgtaaattctcaaatatcacattctttattttctctaaaattccataggaaagtatcaaatagcaaaaataaaatatttgtagtgtgtatactaagtttaaagacttatcagttttgagtcacacaacaaaccttggtggtaaattatatgatttgagtcacacaacaaaccttggtagtaaattttgtctccatgttccccactgaagaagctgaggttttgaaaacataagtgacttgctcaaggttacagagctgggaagctgcaaaactgaaattttaatcccaatttgtgacatttcaaagtcattgttcttcctagtatacaaactgccttcatttctttttataaattttgaaatattcattcatcaagtaagtggaggaaaaatttcatttgaaagtcacaaaagcctaccctatgtatgtctaaatgaaatttttaaatacccctctctctctcacccctgccacttgactcaggaaaccaaagagtgcaggatcctctgcccagcatctatggaagccacagaacattgtggcaggtgtgacttcaactttaccagccacatttgcactgtgataagagggtctcacaattccacagggaaggcatcaattgaagaaatgtgttcatctgccgaagaaaccattcatacagggagtgtaaacacgtactcttacacaggtaacagaaagcaagctgtctgcccatggcttaatggggttagtgagaagctgctgaaaatgcagatttatttcactctgacatcaactctccttaaactgatatcagtacattccatcatactttgaggccagctagttacaaggtaattaaaggcataatctggatgtattcaaagtcagtactttaaaatgtgttaaagtctatttaaacaaggttgtattccatattaaggtaaatctgtggagatatctgtgacctttactgctatatccagttaatttacaataaatccaatttcctttttcaaaagctgcaatgcagcttccactgaatgcattgaatgaatactgctatactcttaagcagaaagaaggatgaacctgtctgattaataataaaacctaacagtgctactctgaggatgaggtaaacccaagcatgacatttctccaagatggctggtcatctccaaaagaataacctttgcagttattgtaaatattaatttctatgtaccatcttggccctgctgaattagtccaaaatggttatgcttagttttggctgagctgtgtgagaaacactgttaagtttagaattatctctaaaacagttctgccatcaattaaatttgtgttattcatccatttacttaagtccctacaaaatgtgttcttgttttttgaaaaatcaagtttgtgtgtgtgtgtgtgtgtgtgtgtgtgtgtgtgtgtatcatctatcatcttgattcaatagaatccatttaagtgacataatttgagcaagctaaggttaataaacaagcaaaacattgctccattccatcatgaatcatcagtctgctttactcaaccaaggggcaataatggctaacctcaagagtgcagaaagtaaggcaggctactaagataagaggaggaagattaggaagggaagaaaggaacagagataaggttgattgaacattatttagtctcaatgttatactaggtactttaatttttttattatactttaagttctagggtacatgtgcacaacgtgcaggtttgttacatgtatacatgtgccatgttggtgtgctgcacccattaacttgtcatttacattaggtatatctctacactaggtactttaaaaccttatctcagttaccaacaaagcaatcatataaatatggtcatttaacagatgaggaaactgagggtcagatctgtaaaagttactcgccatgagaaagaaacatattcaaataatgccatcatcaaaagggacagactttgaagactccacgtggtgcaggagctcctttcagagtgctccaaatgcacttcaagctgttattccacctgaaatgtcctcctttatcatcctactcaaggcctaggtcaagattcttttcctcaatgcagtccctgtgctgctatggcacattgttcacaaagctcactagctctctcatgtgtcatatggatttggacacttgttccagctcttctattagattgaaacatccttatgaatagggcatttttgtttacctttgcctcgttatttggatttagaacactatacaaacaaaaaatatttcttggaatgaatttaattaggaaaggcctcagatagaggacaatttgtccaaccttctattgtgttcccagtcccagttatagatttaagtcatggactttcatttttaaattattgagtttccatctaagagagttctctacttttatctgccccttgtaatcaagatcaagattttgaagggcttttaataaatacttgtaatagccctctccagaagtgaatagatgtttccacctactgatataatgttatgagggcttttaaaatccatatttcagattgctttgcctgcagaaaatactacaaattgaatatgaaaaataacaaactgttctttttcatgaaagatgttcagcacacaagtggtgctatgataattccattgagaacaatttagattaagtcagactcttttagaaacttacacttgaaagctgacaataccagtgctgacaaaaatttattcatttatgcaatcatttatttatcaaaaattatttattaaatacctactaataactagtcactacattaggactagcagctatgatgacaaacaataatttttcattgagatttcaaccctatatgaagaaagaaggaagcagcaaatgagatttgaaatggtaatgtgggcttgaggatacagaataacagtcattaccaataagtagtttaatttgctgtagcagaaatgtaaaacatattgaccatctgagggtaggtagatggtctaggcaactgaatcgcacaaggtcattcaggtatccagaatccagaatggcaaccgaaggtatgcaattttctctttataaaatgatgtggaagttgtcagtgtctttctatactccttcaagtattgagatctgagtcatgtgaccactagaagctacaaagaaaactggcaaatgtggttttctaagcaggaggcctctgaccaggatggaagggagaactggggactcatggttgccatcacaggcaacaagtggcagatacccccgagcagaaaaaaatggaaaaggaagataatgctttacatttgtagagcaatctgcattttatgaagttctgccccataatttattgcattgtattttcatattagttctatacagtgggcagggaagggtttattgtaaggagatgtatataaggagaatgtctctccattaatctaagcatagagactgagaattaactccacgtccaatggagatgagcaggtggccaggcagccaaggaggaaggcctccttttctgatgctcaatctgagaaagagtcatccagaagctaacacacaaaaatacatacatacttacttaaaattcatcaaattagagacatggaaaataaatttaaataattaaactttcaagtaagtttttcaggggaaatgtgtagcattggtatttccgaagttattaaagcctaaatggaactaagactttggggacacaactgaatcacatgagtgttcatctaatacaatttttgccagtttggaaagctcagcaggcttggttttattgttttaataaagttggttggtttgtattttggttttcagttctggcttttgtggaagagggaaggaactagatagcagagtatgctttcatttttattcactaacatggtaccatgataaactaagtttcaaatcctgtatattgtaacaacattataatccatatgatttaaaattttttaagtaatattaacaaagtaacagaaagcaataatttataagttctatgatactaaaactataaaagaatgttgccaaacctgtctcatgtaggaatcaaaactacatgaatttgtgaagcactaaatcttattatacatgattccagtgcttttatttttcatttatttaatatatccctctttctctgctcagaaacagggaattctattctgtgcaattccgtatccctgcatctaataaatactttaaatgttacttatatttagaaaataaagatattagagttttatttatatacaaagcgtttagagcattaaacatttatttttaaatgtctaaagtttttgatattcacttttaatatgatggttaaaaaatgaaaataagagaaacttccctgtctattttttctctttccagatgtgaacctcaagccctacatgacatatgagtacaggatttctgcctggaacagctatgggcgaggactcagcaaagctgtgagagccagaacaaaagaagatgtgcctcaaggagtgagtccccctacgtggaccaaaatagacaatcttgaagatacaattgtcttaaactggagaaaacctatacaatcaaatggtattgagatacctttaaaatacaaataacaaaatcccataaattcataagaaaattgaaatgagtacaatctacatttaattgccctatgcatctaaccactagaaaagtatgttccgataaagggaactgtaattatgtgacaactaatcactcactttgtggtgtagtcctcgtagatttttagcctaaataagtaaaaaaatagaaatgaaagttccttgaatcccagaatatatctgagctgctttcaaaacaagcaaggcatattcagagaaggggaaagagttttaatattgaaagtaaatttgtttcatagtgaaaggaaataaacataaatgactcttatcatttatgtcaagaatccatctcctccataatagtataattaggaactgcttgagacagcaatataataggaaattaaaattaaataaagctatagtattgcatttcttccgaacactaagatttgtaagttgtttgcaaatagttaaaatgatatcacattcaaatgcagtcatttttctgcttcttttaggtcctattatttactacatccttcttcgaaatggaattgaacgttttcggggaacatcactgagcttctctgataaagagggaattcaaccatttcaggaatattcatatcagctgaaagcttgcacggttgctggctgtgccaccagtagcaaggtaagaggagtttgcctaaactctgggaaaaggggttcagtgtgaagattatctgaacatccaggttgtgactgcttttttcattgaagaaaacaatgtccctcctcaaagtggtgttaagtagcgtgttcatgtgtcacgttaactgagtgctaatacctatggctggaaggagagatcatttcaagggagatttatccaaatatcaatcttgtgttaatgaaaaacaagtgaaatcttgaagcagtaccatcttttcttccacattctttcctcaccaaccaattttaggtaatctataaatctataaaaatgtccaaatcattattcagttaaagaaagtttctatttaaatatgatatgaacaaaaattgtctgattttaaaaaatgaagagaagggcaaaaaagcctggcacggaaaacaaaattgttccaagccttctgctatagccttgtcaagaaataatgaagacctgaatttaggcagcagaggtcagaaccgagaatacagaatgatacaacagacatgggggataaaatctacaaaacttggtactcaattatatttacagaaataaaaggaaagagtcacggatattgtcaaatatctgcttgagtaatttgtggatcatggtgctattctgcaagcaaatttttaaaaaagagaaaaatgttgaaggtaaaagaataggattctgttttgttaagttttgtaaaaaatatatttaaagagaaggatcagatagcagggtggcggaagcagatagtacttggcactttatgtgaaaatatctggtcagaaaccagattgagaggtgactgaagtttctagaaagatctgtatgggaagttgaagtaatgagtataaatatggacatggaaggagaatagagagaaacaaatatggaatattgtggatgatgagcactggggaatgctaccaaatgaaaaagaaagaaaagcccacaaagaagactggaaataaacaatcaaacaatgtgggagtaaaataaagaaagggacatttcatagaagccagccttgacagaggaagcccaggaggaaacaaacttacacagagtagctctgattcttttcatatgcttaaaactttagaagagcaacatctttgcacactgtgcaagagccatccaaatgaaacattcagccacactgctcagccacagtgcaagaatgcaacattttgttcaacagacttctggaaacctttctgagtgagccaccatttagatagatagatggcagctgattggcccagtcaaaagttattagtcctagaacaattccatgctttttgcataggcacacttcatgcctgctacatgcaaagcaattgtttacaaagtgaaaaaagttaattctatgaaagaagccaatttttgtccaaaactatgttttgacaatattgactaagtaattgatttatttttttcttctgacttgtttctttctttagaaagttggtgcagacactataaagtcatcctaggtatcatgggaagagtaccgaaatgtctgcccatttattctgttcaaagcatattgtatgcaagcaagttcagatgtggcttttgctccatatttactggtgcttaaaatgtatgaaatcaggctgttaaaatgcaaagacactgatgggccatatggaagagagttatcaagagttctctagtaagacagtctgccagccagattttacttgtttaaacactgagggctgcactctgccgtcaaaattgttgttgaacctgttgtgataaatggtagtgtgagacttatgtaatatattcaaggtcagatttcattgtttaaataggttgggagggaaaaaaatgaaaaaaaagggaaatgcttctccaagcccctgctaatgatatgccaggccagacaacattttaaaacaaaagtgacattctcattgatcaggatagctagtgcactattacaataaattgctgcttaattcctacgtcttcaggtagttgcagctactacccaaggagttccggagagcatcctgccaccaagcatcacagccctaagtgcagtggctctgcatctgagctggagtgtccctgagaaatcaaacggcgtcattaaagagtaccagatcaggcaggttgggaaaggtctcatccacactgacaccactgacaggagacagcatacggtcacaggtgagaaaacaaaaaaaaaggaaatcctactggaggagtctgtcattgtggttaggggggcaaagcatcccaggggtgtgtgtttgatatatgaggtcacttcgaaaggacgtgttctcttgacatatggtcaggtcccacttatccatgctaatagaagagcccacactggcagcaatacgccacaacagcagataacttcagaaataatttatatttggccttgatatgcattatgtgaagggtttttgcatcagtattaactttttttttcaaacaaacagtaagatgcattttcattccccaaggatatactcatagttaatgggactaagatagccaagaatatactggaaggcaggggaaaatcagccagaggttaacatttgtctatcaagtggataattaatacacaggactagttgacagtggagtcattgtgactgtttgttactattaggaatgttaattaatagcaattgtgtttttttaatttattataatgtttattatcattagccttaataatatactattagtacagtacaatgatatgttagataattgctagtagtgattatgataataattaacaggttttagcttaaatgccacttctgaagggaggagaagcattttctgacttacttgctcgaataggttctctaacacaccaccacatcactttgttttatttccatcatagacctctcactgcctgatattttagtgtttgttttttgtctttttatgtctctccacacttgaatgtaggctccaagagagcaggaaccttatctacttgttcagtgttgtacctctagcacttatagtcctgaacacattaataggagctaaataaacgtttggggaagaagggaacttaatatgtgccagacgctgtcctaagcactttgagtgcactatgcaatttgattctccatcaccaacctaagatgtacagtgaattactaccttcattttacagaaaagaatactttgagaagttaagtaatttagttcattattcgagtctactgaatcatcccaaacaaccctgttaagtttaaattctaagaccatgggcaagattgtataaactttcccttttttcccattgtcagccacctccttccaagacttcctgagtggatgacctccttccattggactgcactttttgcagggggtgttgatagcacagataatgaaactcacagaaaagtgcagaaaggccttggaaaaatgtgactgatttttcctaagaagggacacaggttacacttacacagggtggcaaaataaattcatcacttttcactcttaaatgccacaattccctaacacataagcaagcattcattgacaaaatctccagtatttttccaaaagggccgtaaacctgcagaaggtgcttaatacaactcttggcctggcacattgtattccttacctcaagatcctgggctaaatcaatgatgatagtgttgaggctgggtgcggtggctcatgcctgtaatctcagcactttgggacgccgaggcagccggatcacctgaggtcaggagttcgagaccagcctggccaacatggcaaaacctcgtctctactaaaaatacaaaaatcagttgggcatggtggtgtgcatctgtaatcccagctactctggaggctgaggtaggggaatcactccaacctgggcggcagaggttgcagtgagctgagattacaccagtgcactccagcctgggcaacagaacgagactctgtctcaaaaaaaaaaaaaagataatggggttgggagaagccctcatatttgaatgatcaaaattatttcttttatcttattttacttgaagtggaaatcatcacaagtgattgaaataatggtgttttacataataaaaccttacttctatgtggtgctttatcatttaaagaaacgtttgcattttgacttctctgactctcatcacatccttgtaagagatgtttttaataatcatatctgaaagatgaagaagaaagccaacctactcagcgtatccaaggcattcactgcctgtatctgaaaggaaatcagaatatcatttcgttctcccaaaaatgaattgccagcttgcagttttccagatagtacactaagtggtctaaaataagactgctgctcttaagatcctctcacgtacagggaagactgacaagaaaagaaataactgaaaacagagctctatacaggatgcagtggtgaaaaatcaaatgagtcacttggagtaagcaatgggatgttaattacagggttttgaaaagcaagtttaggcacattaagactgtaccagcaaaggtttcacaataattgtgatataaggctaaagaaatttcttcttgtagtatctatcaacttaaccagcatcagcttcgaattgttgctactttattggtttgcattttttagaaatcagcatttatacaccaacagaccaaattcaattgtaatgttcaaaccaacaggattgatagcctcattaattataaaataattgcaaagatttttctctaaataacttcaccctaccagttcttcctttcattgacatttttaatggctatttttatgtcagagtagatttcatacatgtatcttggtgccagaaatcctattattagcataaatattttaaggttttttaatataattttaatttttacttaacagtaaaaaatcataatctggtaaaagcctttaggagtcctttgaccaatctccctgttctacttttgatttgttttaatttctatggatattgttttaaatagatttagagagtatttcacttgcccaatacagccctaaagaggggtttctttgtagaataaagaaataagtcctcattcagcaaaaccttaccaagtacagagcctcctatatgtagttctttggggacaggaatggtgctaggcattagataatcggaaacttgagatctatataatgttactcatttgcccaggaaaattcagttccacggttagctgactgaccaaatgtagtactgaagtattttatggtgtgaatgactgttttattgagttcatggaatgaactaaaataatcaaatttattttctgttccatcttaaatgtttgatggaaatgctgcctgaaccccctaggataaatgttttgattttctcatcatttccaaaagcttggcattccctaagcaacacagcactaataaagctgtagcactagtcgtcctggagcctgaaaatctaggtccttaggaatgacaggagggaaagggagcaccttgcctcggccccattgtctccatgcttatttttaattacctcaaagctttagaaacatgatcccgtaaatgctttgtgggaatagtggcgaatgcactcatcatgtgaaatccataaattgcttataatcctctcaagatgttaaaaaaagcattaagtaattgaagacaggaagtcctcggttaattatttagaggtgttatcaatgctttaagtaaactgaagcgttttctgctatctcactgagctgaataccatggggacgaaggagtagcagccatcatcttctcatattcgctaatgcaaacagcgcatggcagcttgtcaataaaagaccttttcatatcatttattactaaacacatccaccatcctgtacagaacaatttggacatcagttatggcattgtttcactttgggctacctctacattatacgtaggcctcctaatgtgagtttaggaatagaagaaaggattaactaaataattaaggccactgagaaaaaaatgaattagtcatgtcctgtttagcataacgtataataagggcctatgtgtctcttactctggaaaactattttcaaaataattaattagaaattactcatcattgcatttcatttaaaaggaaaaactcaccagcattaaattagcaaggaaagaataatttactttcgtttctcatcttcctagaagttaatgaaaactttgtgtgctaaatagaacaaaccctaacaatgctggttgtagcagaaaatgtaatactaatgttatactgaaacagataccttacacttcaccttggaaaaagagaaaacatactttaaccaccaatacaacaaaatgtagaaattctttgtaagggattttatttttagataactctgctatgtgttcccatattatctttgctctcgtagtaattatcacattttattctaatagcctttcctcttgtctctgttccacacttagtaataggtaatgctttttaagtacagagacagtagcttcctgtttgccattgtgttcctggtacctatcacagtacttaatatattcaaaaaatgtttgtcgaatgaataaatactgaatagtaaactagtatttgactacattctgttttgaatggagataaaaatgccactgtcaaacgtatctaaatcgcagacagatctggcaacaaaattgtggggtccagtgcgaaatgaaaattcaggccccttgttcagaaatcattaaaatttcaagacaatggaagcagagcatagaagtaagctcatgtgcttccaagcatggtaccgtgtttgattgcacagtcgaagcccacaaagccaaccctgatctccagcagtctggaattagctgcagtatatttctttaattaaaacagatagcaagaaaactaggatggtgataatgtcctcaaaaagctttgggagtttcttctatggttgtttgcaatgctccaggctgcattccccccagttactatgtaattactgaccaccaagcactggggacctgtgaaaatagagataagaatttgttttcttttcattttttcaactctgagaacaactaaatttgtgcctgaccaaaaaagtaaaaaaaaaaaagaaaaaaaaaagtgtggcatcaaccacttttttgtgttttaaaacctgcctattgataaaatattaaggccaaagaactataattgatagctgcctagacaatgatattttttaaaattccccttaaatcccagatattccaatgtactttgccagatactagttctgttttgtcactccagttctggccacccccttccctctgcaatgtcctcattgtctcacgtttgagcaacatcagattttgctgccacctgacatcacattttgtttttagagaagaaaagtctgcctggaaatgcagagaagaatcctcagtctagcataacactgaacttgaaagaggaaaagtatttattaaaatatttattaaaatactgtcactaaaatcaaaatatatatatcacagatataattcatattatatttttgttgttatatttattccagatatacatcaacattaagactattatttagacaccaccaaagaaaaagggtctttccttggtggtgtctaaataatagtcttaatgctgatgtatatctaaagagagtctgccaaagaagtaacttgtttaggaaaggcgtcttgggatcaggaagatattggagagaggggcctaagctatggcccagaatttcaaatgaaatatagaattaataacgcaagttagcttatagcaagtagtcagaactaaaagtcatgaagtgatcttactggcatgtgcaatgcaagagtccctttgttttgatgttttgatgttcagttcatatgaggtagcaactgaattcataaagcatgaatacagaaaatggacagtacaaatgctgctcaatgggggggaggaaattggcttgggtaagtggaatgggcagctgttgagattgtgaagaatgataccatccagaaaagatggctttagcatgtgaactcccgaaataatccttaatcaaatcctgtaaaacaaattctaatttaaaggtaccttagatgtctgtaaagtaattccatgatgcctttgtataccagttttgaacatctggattttcacagattgtcagattgatctaagtagaatgctgatatggctctatccatcacagtcaagatcaccaggggatgctggaagttcctgggaatctcagtaggcagagatgctccgaaagggatcacttagtgagatcccaggcaagtgagggcaaaaggaagcaacatcattatagttgtctgggtatatactctggggctcgttgtcttgcgccaagaaagaattcaggacacagacacatgtgggtgtgttaaggagtggaaagtttaatagaagaaaggagagaggagagcagctccttgtgagagagagagagaaagacagagagagagagagagagagacagagagagagagagagagacagagagacagagagacatccgtaaagtggggaggcagcggaccaaagcagattttacaggcaggctggagaaggcagtgtctgatttatatagggctcacagattggttcgatcaagtatgacatttacatagtgggaggggaaggctggtcaccccaccctaatcttattatgcaaatgggccttccagttgattggttccatcttgtctgagccttacagtacaagtggctgacaaggagaagggaagatggagcctccatcttgaacatgtacagtccttagttcctgcccacattcacccatgcaagcacccagcttgtttacctatgtctgcagctcgattttacatgcttgccctttgttagaaaattatttggggctttttactaaaaagaaaaggcttaccgaggactcccatacctttactatctgcctaagtgatttcttcttaactcctgtatcattagcaaggactgaatgtgagcagccgaggggccagaccacacatccagtttgggtgaactggtgccaggacagatgacttacccgcaggatggttattcacaatactttataagcaccaaacaaaaactttttaacgtaactcaggcctctcagtgcttgagctaatcactaaacatgctgatggaggaactcactgaattacacatcctttaggactatttggtaattctttagaacatagcagatgacactatagaataattggctgaatgttttgaagtagcacttgctatgtgaaattataatggctaaagtgcctttttttgactatttatcaagagattaaaaattggaagcaagctgttctttatagagtacatcaaatgttaactttcatagacatgggttttgttttccaaatcatatttttatgaactaaaggcagactttttgcagtcccttttagcacacatttactcttcaaagtaatgttacttggaagtgtaattgtaatgagtttggttatattatgcttctttcctttaaaaaagaacatgattccctgtagggaaattcaggtaatttgcagccacagtaatcttcactatactgaaatgttaaatacttggcttttctccatgtgtttgcctttctgtactctacaagtgctatttcctactcttctaattcaatgctgagcacttgaatgatgttttcttttctccttctactcttcgacttcaggattaagttacagttggaatggttcctttgagacatctctttatttccctcttctcatcctgatcaattcatgagtagttttcaattggtgtgccctttttattgcctgttgctagtatgtcatatatatctcattttaaggactaccgatagaggcttacttaaaatgacagcaaattccagttgaaatgtgttcattttattgagttttacagagtcgtatatatgaaaggtcatcaggttcatgtaaatcatctatgcctgatggtagttgatgctttcttacagattatctgaaccaagcctattagtaatccagtcctctaacaatatgaaaaatataaaaactaaaagatagaatatggttttaaattttctaaattatggatttagatattgccttcccttaaattaatctgtaggcctattaagcagtctctactatcatgcctacagtttatagatatagaaactgaggaacctagaagccagaaaacttccttgtagtctagtacttggtaagtagataagtattagaacccaaatagtctaatttcagactgctctcttagcacagaacatgactcagtatctcactacatgactcataataatattcaaaatgaaaatatttaaatatatagtcccacttgaatttttttttttttttttttttttttttttttttttttttttttttgagacggagtctcgctctgtcgcccaggctggagtgcagtggcgggatctcggctcactgcaagctccgcctcctgggttcacgccattctcctgcctcagcctcccaagtagctgggactgcaggcgcccgccactacgcccggctaattttttgtatttttagtagagacggggtttcaccgttttagccgggatggtctcgatctcctgacctcgtgatccgcccgcctcggcctcccaaagtgctgggattacaggcgtgagccactgcgcccggccgaattttttatattactggaaatttgactgggctttgagctatttatgtcatcgtttttgttataaggctgggaagcctaacccagttgctctgggccacatttctcagtgtaattgcccaagttccaaccttggcctcaccctttccttttctttctttctttttttttttaggcagtctagctactatgtcacccaggctggagcatagtggcaggatctcagctcactgcaacctctgcctcccaggttcaagcaattctccagcatcagcctcccaaacagctgggactacaggcatgcaccaccacgcctggctaatttttgtaggtttttttttttttttttttttttttagtagagacggggtttcactatgttggccaggttggtctcaaactcctgacctcaagtgatccacccgcctcgtcctcccaaagtgctgggactagaggcatgagccaccgtaccaccggtcccggccctttcttatgtctgtgatcataggtactttcctccaactttctgtgccttagcttccttatctgtataatgaacaaataatagcgtgcacagcagaaagttagtgtgggcgttaattatattaacacccatgaagtgcacagaagagggccaactagtagtacatgctcaataaacttttgctagtatgtcatttacataatcttataactaacttccttgaaaataactgcaattctcataaaatatatttagataatgtatagagtccaatgaaaagagaattaaaaacagaccaacaaaaacaaaaacaccctgagttttgtctgttgggtattttttttcttaatttatagtttttgtgctggtgtttgaactacattcttttaacttttttttttcgttttgagcaactacagtgtatacaattatgacttgccaattaaaataatattaattttaataaagagcagctgcaatggtttctaccatttttatgtcttctaaatgctgcttaatcttcagagggaaggcagccattgagtaacttaaatactgttagctctagctcttatgtgatggagaacatagagcttggtattcaggcttgggtcatctatgcactcctcagtccaggtgaagtcaacgctaaataaagtacaaagcctgatagtggacaaatgactggcttatccaaggaaaatgtgagttttgttataaaaagcaggaacagaccctggaaggtaaatatggcagatgtgaagttgcttgacacacattagcaaacatcatttgaaatgagcctaagtattactaccctttgcccacatggtccattaaactggtcagcatggctacatttcagggacagacacagctcttgaggataaagtgccaatgaattagagtaaaactgtcattctccccatattcacttgcagacatgtctcccactctcatcctcctggttcttcaatctttgtctcctttcctcagtgcaccatgttgactcctcttgatttgataatatgtttgaactcctctgacttcttgacgaaggttttctgctcagtgctgagtctgccattcctccttgattctagtaccccagtagcttcaagagaagcaaattccttccaccagccctacccccatatcctgctaggtgaacctatcccatctaatgtaaacacctgtagcaaactcctttgatgcactttcctccctctatcaaaaatccttaaggtgctggatgctctactgctgtaccatgcctaaacacctgccttctcaaattctaggctgtaagtaaaatggagaccactcaacttgcagcagaaaggctttgtcaagaaatgacaatttatatttttatatacattaattttcctttcagctacgattctcattacaaatacgcttaatcctctaatcaaccttagcaaacctctgtgattatgaattttcttttttccctaatgcccatcctaaaattttatttaacagtcactgcatgtctgaaatcagaccagccacgaccacaatgaggaagataactgaggccattgttttgctcagaatattcgagaaaaaaatttaaatatctgtttacttttagctaccatatttacatctggcattcaggaaaaaatctagaatatgtgtattgcccacaaattatattagtttctgttattttattaatattctgcaactaaaaaatatctccaactcaatgaaatcattgctgtggacagggataccgatggaattatgaggaaggacctttttggtcaggtcacatggtgataaacatcgtagcctcatatccctgcaatccttatgggacactatgatgggcatgctcttctttaagcaatatttgttcaacattgaatgcctaaaaatgggcactataggggaaagtgacctcccaaaaagactcgctcagtgatgccatttctactctcaaagggcttatattctaaatggggaaaataagatattcaggtaaaatggtatcacactggtcaagacccctttttgtcggtaaagagaatgaaggggagacattgtcgagctaaacgagtttgccactgcaacctctgagtttcattcttgaatgttcccttccattattttgagctttacattttgtaatcatagcattttccgatgagcttttatcaaacatatgtggcttgggtacggcttagatctttagtcatattcttcatctgtaaatcaggtaaatatcaaaattatgtaaatcctccaaagcaaccaaatggaagattgtaatcaaataagtgcctgcatcttatcactaagttgataaaaaaaatacaaagggctctgaagctaaaccttggagcagctccagctgcagaacattattgctttagcagagaacccagactactgctctcattctaaatggatgagatgggtaattttttcattcgtttaacgaacacacactttgtgcctgtcacaatcctaaggatacagataggcaaaacaaagttgttgttctttcagagcatacatctaaagcaggagacaaatatcaaataagcaagagacacagcaaacatcagagacggttgaaggctctgaaataagaaaattatgtgaggggataaaaagggatgggtggattgtttagataaagtggtcaaaattttttaaaatgtagtatttgaggagaaatctgcataaatagacaaagtgacacattaacatctctgaaggaacagtcattccaccaaaagaacaaaatatgcgaaaatgtagctcaaaatacgtgaaaaaataagcataacaatcattggattcatctgtaacttagttcaattatttaacaaataggctcagtcctgttgttttaaaatactatttttttctcaaagagagctttggcattgtttgaactttcccaagagtcaagagagagatgtcttgtaagcctcaatatcctccttgttgaatgctgctgagctttaaagttgcttctgctagaatgaaatactactttgagtatcctatttcatcttctcttgtctgctagatgctataatgattccccattttacagatcagtagaccaaggcaaagagaagctaagtaactctaacaaggtcaccagccacgcacagagcagcgaaatctaacaatatacaacttctattttagatggattgtcattcttttctccctgaaaacttactgaacaattaccatactgcatcatattctgaatacgaaagaagtaataagcaccatctcttctccaaattagctttaatctatgtgtaaagacaaaatcaacacacctcaaaaaagggcgcattagatacagtgcaaggtttaaaaacaaaagtgttggttagcgttaatatgagttgaatatggcttggggcaagaaaatgttggatctaaccttctttttattttcctgcccgtatttatataagaagcaattgcagagactgggatggttagcctggagaagagaagactcaggggggatttgataactgtctacaaacatttgaagagctgtcatgtggaaaagaaattagatttgttctatatgtccccaggggtgaaagtgatagaaagatttcatcacaatataaggaaggactttcaaacaaaataaggataactctaaggctctctaaagatgtaatgggctctttgagagacggagtgctctgatccgataggcaggacagccttttcaatgacatcttgtatagggaatcaagagaagggtggatggttcacatgaattttaaggtcttttctatggctgagaatttattagtttatcagtgataaatgaaattttgcccaatacttagcctcttatgaggttcagaccttctttaaagagtgttttagagagtactcttaaatgttttggctatcatatctacaactctgcatgttacttctggtacttaattgataataaataatcctcttaaggtgcactttatttcttgcttgctttttctaggtctccagccatacaccaactacagcttcactcttacagcttgtacatctgctgggtgcacttcaagcgagccttttctaggtcagacactgcaggcagctcctgaaggtaatgaaacaatatccatggtttgagggaagaaattttcacatagcattttgaggtggaatctgtaaactccttcataacaaataaggaagaggcaataaagttgataggtacaaaataaaatagcattctaggttcccattcttcaggcttgattcatgtaggtgtagcttcccaaggtcagttcgctttcaattctttaacctttatagagttgattttctgtggaaagaagaattattgaaatttttcaaaaactcagatgttaaatattttgggagcatctaatatataataagcaccatgctcactgctgaagttgtttaaaatgttctctgccctcaagactgacaatcaagtagaagtgataggagaaagatctgtatgaagagagaaaatctgaaagttgatgttaagaaagaacaaatgaatagagtgctaaggttggcctgaagaggaagagatagaaacccatcgatgacatcaaaaaaggctttatggagcagatgacttctgagatggaccacaacaaacaaggattttgacaaatgaacagtgatgtacagagatgtacaaccagacacagttggaaggaatgtaagatggaatcatcaccttagaaggcaaattgcaaatgtctatcacatttaaattgttaatttcccatgatacagctgttctattttcatcatttatgccagaaactgtgccacactgctcaaggaggcatgcaccaggatgtttattgaagcatttattttgtttaatagcaaaatgttgggagcaattttaatgtttgtgagtagaattgctaaataaattcagctattctcatattgtggaattccatgcaccagtataaaagaatgagatgatcagttcatacaaagaggaagttatgacattatattaatttataagaacaaactgagaaaatggcatttattgttaatggttaataaataaatgcatttaaaaatccaggaagtatacacaccaactgatagcaatggttacccatgtgttcagaggtgggatggctggtgtcatttactttcaaaagaaaaatatactcagtggcatgtgttagtgatcaactaattattttgttaatcttcattatctgcctatttttcatatggggaaaccaaggcataaataagtttctaaacagaaatgcaatgttaattaccaccatagactcctgaactacttgtccattactcttctaatgaaatggattgttgtacctcggaatattagacctgaacttcctaccagtaaatggggaataaaatggaaaattccacatatggggcatatggctcctcaccaggaattcactaatgatgttttctatataaagaatgtttcatgtcaaaaagcttagtgttcctttgaaaggaagaaaccagcagtggattttttggaaaggtaaactatcaaatggatactttgatgataatggataatttctaaaggatctatcaaccagatttggctgaaactcaacctgataaaataacagaatctcttgttccatttctctctaccaaattcatatatttaaattcattggaaatatgaaattttcccaacaaaatttcttgaaatgacttacattttatgacttaaaaattgtagctttcaacagtgcagggtaatgtgatatgagaaatgcccttgatttcttttttttttttaactttatgtatctttcctctaacacaaataatcatgcaaagaaataatagatgaaatggactttcctctgcagaagaaacatggatttagggccattttctggctgaataagtgccatttatatataacccatatatgaaataaatatagtgtgaatgcttaacttgggaacaccttagcaatcacattaagttctgttgttttactgtaaagtgaaaacaagtataccactttagattatccacccagacataactaattataaaatgccattttcgaagtacatcagatataatttgaagatctcatatttgagtattttaagtggacatggaaagaattaaaagaagtgtttatgcatagccaacgcaagctgagctcttttcacttgcctctcattttcaatctaagaaaaagtcaatgtacattacaacctcattgacaagttggacacagttctctacagttttatcctcatagaaaactgtgtacctgtacctttagtcaaataacaggaagattttgaattgaattattactctttttttctacaattactgccatccatgtgagttctaattcattttagagataaatcatgcaaaattgcagacatactttcctctagcattgataatgtggaaacagaaaggaaaagaagacccagtctttttcagttcattccagattcctcttcctctgcccttcttttaacgtttacacacccttggttttttcctctactctttacactatagcacccaggctcttctggaattttcgagtactggctttatctcctaatgaaggctgagagctaccaaatactaaagctctcaccaaagctacacttatggatttaaatcctatgtatttactggtctactacatgtttatatttaggtgtttttcaaaaactttaacctcagtacttcgccacttaattcttccactccactctactcctcaacttgcttttcttctctcaaatactaccacctacctatcacctaagcccaaagcttgacactcttgatggctcccttttccatatgtaatacataattttttataaaatctaattagttttaaatcttaagaattttttttaaaaaaattgttcttctttcccgtcccttttaacactgccttagttcagatcctcatagctataagaagagaagttctctggatcctcctaactaggatcccttcctctagtcatttttcctctttctcacatcccacatcctgattctttttcctcttttgacaaaataagaatatgtcatattattcacctccataaagtcccatttccttccaggaagacatacatccatatctccttagcaaagcaacatggacccctcaagttttaacttccatcaatttttcaaggctttccatcttccccacatgccatgcagtgcaccagccatgccaaggtatgtgcagtcctgccatccttgcccacatttctacgactttatgtgggttcccctcagcctgaactccctttccctacatcctcactcagttaacgctcaccttttcaaaacttggttcacgcatctccccttctggaaatcttccactacaaccacctacttcctacccatctccacttctccccacagtctgtgtcaggttaccctttctaagtgttctaacagctactgtgcctccttctcttaaagcatgtatcatactggagtacaactttttatcgactcatctttattcaccatgatacatgaactccatgaaggataagaaaaagtctttatcttcccatccacagtgcccaacacagaaaatgacacaaagtcgggtagaatgttgagtgaataaattaacaaatactaaattgtccagaattcagtgcatccctgacatcagctaatacaaaatttgttcctatcaccagatttcaggagaaaaacaatccacaataaatgctgggaattttgaattggaatgaagatttgtagggacatgagaagtgggtaatatggcatgcaactcaagataaatttaaaacaaatacagtagacatgttctacttgttgtcactgtgtaaaaaggcccaccaaggtttaattctacctttccccttttaaccttgcagctagtttaccccaccccatcctcctaggttacttccctccctactattcatttctttcacttgaactgcctcagtttgctcccttattatatagaataggtttttctggtttcacctgagacttaggccagagttacatggtgaaggggacaaattccccacctcggactcattaatatatctcaccaaagattgtcttactctagcaaagatttcttgcagctgccaagataacgatgtccccatatcaccatccaagtaaaaatgcagcactttctagttatatatacatttgaactccatattatcaatcaaaccaatgggcatggagttattaccaacttgaaaagagcttttgccagccggtataaataataaactcaacttttacctaaaggttgaaacaaacccaaaattatgtttcattttattttattagctcctccacatccacaggctttattgactggttcaaatcagaaaccaagcaatagccattctagtaccttggtgatttttaatacatcgttcaaggtgaaaaagatataactgcaggaagcagattatgaattaagattttatactttatcttttgaatcaacaaattaatatcacatttaaatcaaaactctgattggttgaatcatctagcagctgttggcagagaaacccacatacaaatgtgtactatgatttgtgaattttaccaaatatctagaacagagcagactctcagaacaaaatgaactactttcttctcaggaatatattgctccttagaaagttgggatgtttgagacatttttgaaatctatcttgtttctttcaggatgctgctaaataaattgcattttgttcttctgaaaatttttcttctaaaagtgtcaaaatcttaacctgtacggagtaacttacacaggagatacaatcaagcaaaagctattgattacagggaacctaatattgaaatgagttttttttaatctccagaagagatttacagtgtctaatcagagtataactagatgacaacataaagtggtaggactgaactttctcactgctggcttctccatcgatggatttgtacatctataagagtacttgaatgtttgacattgaattacagttgtttgtgtgtatattttattttttagacagaagtataaactccttgaaagtgagccacatcttagtcatctttgcattccctagaactgcctgcagtgcttagcataacattttgcaggagatatatttacaataaatctactcattaaacatgtattaggcattgtgttatccatagagatacattgacgaataagacagagaagatccctgctaccatggaactaactttgcatcaaagtaagagaaaggagaggactgcaccatcatataatgtaaaaataatagtatgtcaaagaaagaatttgattatgatgtcttgagtgttaagaaggaaatagaaaaggccatgcgatacagagaaactaggttgggactccattagatggggttcaagttagagttaagagagtgctaaaatgaggccttatcaataaggtgatagttacacaagtaactgaactatgagaacatatgagaacattctacatataagaacaattctacatatgagaacaaaatgcaaaaatgtcatgctgtaagggaacaaaggtgttccaggccaaaggaaccgaagttcaaaagcccaggtgtaggaaataactagaagcattctagggatagaaaggaatctggtatggccacagctctgtgaatggtgcaaagaatgctgccacttaggccagagccaataaaatgtgggaccatatgggtcacaaaaagaaattgggattatattatatgaataaattcaaaagggttatatggttcataaagatgacactggcttacatattcactttatacacttttacaaagattccaatggaatatggaaggccaagatttcgacatggaggcaagtttagaagctatgacaggagtttatgagagagagaaacgtggcttggaccaggagaagtgaaagtaaagatacaggaaagtatacattatagaatcttctgggctttatgttagattacatttgggcgtatgaaaggtgaaagtctcagggatcattatttttgtgtgttttgtccaagaaaatggatagatggacaagattgggaggtacatagattgtagacaggaaaaacaagagttctgttttgcatgtttttagtttttgatatatcatcagtcatccaaatggaggtgtcaagcaaacagttggattcttgagtctcacactcagagtttcaatctagagatatgcctttgggggtcttcagcatatgcatatttaaaacccatactgaatgaagatcacctgggaagccggtgttggaagagaagagaagagagaaaaagaagaagagaaaggaagagagaaaagcagaggggagagagagaacagagcatactgctctgaggcattacatcctttcaaggtccaggaggggaagagatcccagtaaatgaggccagaggcatagccagagaggaaaagagaagcatcacactgatgtgcaagaagaagggaaagtgcactcatttgttgaattgtataattcaggtacatactcgattatgcttactttcacatattccaggtaaattgtattaaaaagtttgaaatccccagatgatctctcaggccttgatttaaaatactctcagagtgacaaccaaggcagagaaattatccactgctagttgtctgacattcactttccaaaggcaattcaaaaataaaataatcaaagtaataaaaatatatttacaccaattatgtatttttgttccatacagttagatattttttaaaatcaacagaaaaaatatcacagttcatgggggggatggtgtgacttttgatacactgtttattttctcctaacaataaaacctcattgcgttattcttgccaggagtttgggtgacacctcgacacattatcatcaattctacaacagtggaattatattggagtctgccagaaaagcccaatggcctcgtttctcaatatcaattgagtcgtaatggaaacttgcttttcctgggtggcagtgaggagcagaatttcactgataaaaacctggagcccaatagcaggtaaactaaaagaaaactttaccaatcatacagcaggatttgtacatttctctgggttgataagaaatgcatgtcccactgaaagttgttaaattgtttaattaacttcctcattcattggccattcaataactgatgaaagtgctaaatcattcagtctttagacttcacgaaatttcttaaaaatataaataattcgtcttctgtttgacataaaagcatgagaatttttaaatatacaaaatacatgaagtattaaactttaaaaattaccaaattatcttcaaaaacacgcatccttgaactagcaataaaagagatgtaaagagttttgttttccgtcaactctcttttcttcttgtacagtgtttctctacttgctacaccacatatagttgtgaatagttttagaggaaaaagttccacatatttgcatttcattcccattcatttctcagcagagacaaaaacatatcttaaatcaacagatgttttactgtagaaagtagagatcaatttcattttattgtaaggaatagcagatcaatttaaaaacatctttctctaaacatatttccctgaactccaacctatttaaaaatggggaagattaatttgaatcctccacaatccaccagcacactccaagactttcctgaaatcttcaagaaaagctatgaattactagcaggttaaaaataaatttaagagcagctgaaattacaatggcttggagacaatgttgcctgtgcaagaaaaactaccaagtcaagtttctggaaagggggcaaagagtttgcaatttgtcacaaatttaggactaagcaattgatacaaaaactagtaatcattgttcaagtctcttgtgcatggccttaccacaattcttctttctttttaaatatagatacacttacaagttagaagtcaaaactggaggtggcagcagtgctagtgatgattacattgttcaaacacctatgtcaacaccagaagaaatctatcctccatataatatcacagtaattgggccttattctatatttgtagcttggataccaccaggtaaaaaaaaaaaagaagtatgtgtgtgtgtgtgtaaacattttaaaggaattaattagagataagaatagaactgttaatttagtaaatcagaaagacatagtcggtctcctggataaatatgaacagaaaaatctaaaccacacttctaagtgtatagacgcatgagtacatacatacatacgtagagatataggtatctagatgtcgatgtagatatgtaagtatatacagctttctatgaaagcaacactttcaagtacaagagactaaaaatctttttactcatctattttttttttttttttgagacggagtttcactcttgttgcccaggctggggtgcaatggcgcaatctcagctcaccacaacctccgactcctgggttcaaacaaatctcctgcctcaggctcctgagtagctgggattacaagcatatgccaccatgcccggctaattttgtattgtttttagtagagacagtgtttctccatgttggtcaggctggtctcgaactccagacctcaggtaattcacccgcctcagcctcccaaagtgctgggattacaggcatgagccaccacgcccggcttactcttctatatatccaatgcaagtcatataggtcagaattaccttgaacattcatttccatgggactccttagattggatcattgacattataccattccttttatattaaatcagtgaatggggagtttggaaagacagttgttcacttcacccatgtaccttgggttgtgaccacttatggtagctgcatttttcctctgtaagctgaatagccttcattgagccatttagtcattattgggttgccttgtgacttagtgcaacattatattttgaggtaagcaccatcctcaggtaaaatcctgactgcattaatactgtggagtaaagagtagagtgagaaaggacatatggaggacttttctttccaagtaaaatttaaaaatggttaagatgttaaaaacacttcaaaattatgtgactttatttttaatatctagtcttaagatgaaattgtgacacgccctttttgtcgccatcagaataagtttagccacagttcaaagtggcaccaaatggttaacagccatttgagccatcggtagatccattccataacataattaacataagcctatttttattgaattgaacagtcaaaacaggtactattgtatagctataaagagagcgtaaagacctaatacataaaacttaagtttcttatagaccaacaccttctgctataatctaagatcaaagagaaaaagttattttcccctaaaattcaaaagaaagtttacaaagagctttataagcaaagaaaaatataagttgctctaagatattaaatgtacatgatttcacccacttttgtttaaaataaatgtgcagcatattaaacaaaatataaaggaataattagtagtggcagaatgcatcacaaagtgctataatctttatgttgtaagagcatagatattcttgaactctgttcttaatttcgatagaggaaaagacatatcttctgctgtgggaaatatataaatttacagccccctttacagaatttatttctacttttgtttaattttatttatttatttatttatttatttgtttgtttgtttgtttgtttattttgagaccgggtctctctctctgtcacccaggctggagtgcagtggtgcaatctcagctcacagcaacctccgcctcccaggttcaagcctcagcctccaaagtagctgggactacaggcacacaccaccatgcctggctaatttttgtatttttagtagaaatggggcttcaccatgctggccaggctcgtctcgaactcctgacttcatgatccgcccaccttggcctcccaaagtgctgggattacgggcatgagccactgcacctggccacgattttttagtatatttctccttggcatttttattgtgctgttgtgtttttgcaccacaaaataaaatgaagctggatagagccaatctaataccatatttagcctattgacaagaaagttttagatttagaccagggtcttctacaatccaaattctccaagagcaatacgggaaatttcagggtgatgagcaaggttgatgatttctttgccatatgactgggaagtcccatggtttatcaaaatatctgttattttaacattatttaacatatcagttgccattgctaatctgaagacttcatgttcagtacgaatttgaaaatatctttattttatgactatgcaagtaagagaaatgaaaaagcctggattcatatcccaatactgccacctattagctgaacttaaacggtctctaggcctcaattttctccatctgtgaagtggagataatgatgatacctacatgtaggcaggtagggttgctgtaaagatcaaatgaagtaatttatatgataaatatattatctagttctatataatattctatagataccaatggtgattgtttgaagaattatttttttatctttaattgctcatttttaaaacgtatttgttccaacatttgctgggtctcaaagccccaattttcaaaataataaaaccacctactgaggattggattagtaaattttcaagacctctttcaaatttcccagcgtgtcatttttttctttgaattcaatatcacacttaaatgtttaatgtatcatgtttccatttagaaatgtatcattgtggaataaaacacaactttcacttgtttaatatgaccttaactctcacatacctcaggctttgtataaattgttcattctggtccagcctaggggatattgtagaatgctttacacactaactctgaccatttaaccaatggttaataaatctataatattcagacctgtcaatcttatagtttaagatgcacagaatccatttcagaaaccatataatataaggaaagattaaaatcttcaattaaatctttttcctggtgtctagaaggatttcaaactcagtaaacagtcagatgattttgacttgtgtataatctacagttgattttattggaaagtacctcatgctgtgttttgatttggataataaaaacatgtttctattcctgaatagtcacaaatatatatattttaaacagaaagaaaataaatttgtaagtggagattgtttatttgctcacaatataaagagttttctaggtattcatcatactccctgccattacaaaatgactacatcacagacagagctgaataatgggcaaaacagtccatgcctgcagttcccaaacctgaatgagcattagaatcacctaggaagcttgtgtaaagacagattctcaaccccaaatttactgaataagaatctcctgggatggagtcaagaaatctagagctttttaaaaactccacatatgactttgatgtgctaccaagtgtttttgaaatagtagcccagaggaccaaggaacagatctaggtattgctgaaaccaaatgattctgggagaacaatgtttgactgggtgtgtagtggcgtgccaagactagaagagttaattgtggaaaatggcaagccgctgaagggaaaacagccacgtgacagcaatgatctctgcagcatgaagaaactagtaactagaaagctttacctacccatccaaaaatctaaaaggaatagatgtgatttaccaaaaacatggatcacactcaccaagtgagactggtgaattacaataactgttttctctgaaaacatgagtccgccagtttctcttgaatgtctaaagcaagcttatccaacctaaagcccaggatggctttgaatgccacccaacataaattcaaaaactttcttgggatctttgcaattatttgttttagctcatcagctattgttagtgttagtgtgttttatatgtggcccaagacaattaatcttctttcattgtggcccagggaagccaaaagattggacactcatggtctaaagccaaaatactggctaaattgtatttgtttttttaaatatgcatttttttttttgtggtcagtgtgaacagagtaaccttagacaggtaagctgctgggaaaaaaaatgtctatgtggttacttggcaactgaaaaattacctaagcaattaactgaattttcagttttcaaactattgttctaatgctataaataaactaagccttagtacatgtttataagtcctactagtgaaagggtaaggtctagggaatagtgacaatacccaggggaagagtacccgtgatactgataacaaatgtcgtgtacatacgttcatattacttggtgtatttgccatttgttaaattcctactatatgccaaacactgataagctccttctctgccttacctcagttaatttttatgcaaacgctagaagacaggtaataatatcattatccccatcttaagataagaaattcgaatctcaaaaaagtaatataatatgctcaaggtcacactgcagagccaggattcaaattcaggtctactgtctgctactgccttttaagaccagttcctttctgtctttggcttaacccttaaatccaaatcgacttttcatttcttgaccaaagtctctcagatttatgatggatcaactatgatgtttgaaatagtagcccagagggccaagaaacagagctgggtgttggtgaaaaccaaatgattctgggagaatatttttttttaattttttttcttttattatactttaagttttagggtacatgtgcacaacgtgcaggtttgttacatatgtatacatgtgccatgttggtgtgctgcacccattaactcgtcatttaacattaggtatatctcctaatgctatccctcccctctcccccaaccccacaacaggccccggtatgtgatgttccccttcctgtgtccatgtgttctcattgttcaattcccacctatgagtgagaacatgtggtgtttggttttttgtccttgtgatagtttgccgagaatgatggtttccaccttcatctgtgtccccacaaaggacatgaactcatcattttttatggctgcatagtattccatggtgtatatgtgccacattttcttaatcctgtctatcattgttggacatttgggttggttccaagtctttgctattgtgaatagtgccgcaataaacatacatgtgcgtgtgtctttatagcagcatgatttataatcctttgggtatatacccagtaatgggatggctgggtcaaatggtatttctagttcaagatccctgaggaatcgccacactgacttccacaatggttgaactagtttacagtcccaccaacagtgtaaaagtgttcctatttctccacatcctctccagcacctgttgtttcctgactttttaatgattgccattctaactggtgtgagatggtatctcattgtggttttgacttgcatttctctgatggccagtgatggtgagcattttttcatgtgtcttttggctgcataaatgtcttcttttgagaagtgtctgttcatatccttctcccactttttgatggggctgtttgtttttttcttgtaaatttgtttgagttcattgtagattctagatattagccctttgtcagatgagtagaatgcaaaaattttcttccattctgtaggttgcctgttcactctgatggtagtttcttttgcagtgcagaagctctttagtttaattagatcccatttgtcaattttacctaggcaataccattcaggacataggtatgggcaaggacttcatgtctaaaacaccaaaagcaatgggagaataatattttactgggggcatcaaaaccagaagaattatttgtggaagtggtgagcccctgaagggaaaatatccacattgcaacaatgactttttgcagcgtgaaggaagtagtaaccagaaagctttacctacacattctagaaggaatagacgtgacttaaaaccagattccaggtgtaggaagattttagttaggtgggaggggaggagagtcacttctcaaattgctgtaaagagatcatccaaattctattttaaagccttggtaaatattcccctgtctcccatgtaaaccttcatccactttaccttattctttcttgataaatgtcagtagtaacattaccaaaacactctaagctctagaaaatcaagatctctagccttttgtgtatcatttgaacctctaaatcaggtgacatacaaacaacatatccttataaaaattttgctgaattaatggaggaacacaatggtgagcgagcctccacaatttattatgcagtcaaatgtaaattgtggatatcctgccatttaaaattactcaaacatttgattttctcttaaagtcatccttcgtctacattaacttaatcttaaacagagacatacacacaaagagagagagaggcagagagacagagagagagagacatttcttctttaatgacaaacagagcacatacacatattttccaaagactgcatcttgtcttatggatgtgcaattttttcacctttcagaaaaggtggtattgttttctaacatggaatgggcttcactatttagttgtcctctggccttgggcaagctgcacaatgtttctcaaattcaggtttctcatctgtacaaggagaaattaaatgcctaccttatattgttatatgaagtaaatgagatggcatggtaaaactccattattgtttgaacctttaggtaatgtaaacaaccttagattattcctaagcattccctctcaccttttaccagctctcaacattgggtcaggacttttgtattcatattaaagagaacatttatattaaagagagcaaaggatatatgttaccttaataggtgaaaaattatggaaaattaaatagcaaatgcttcatggaacataagtggtttactcagaatgacaatggagatagatatccctgctgtttaagaatctaaacattcaaaattatttaaactctgaaggtaataatgagtctttctaatttatcgagatgatgactatattttgaactgttctagcccttaatcatgttctaattaacaatgccattgcatttaacacatactttttctcactaaggatggtgagtcatttaggtttaacgtacaatatagaaatactggtgcttttcctttaacattaatatcttactccattaaagaaggaattagcaagaattctactgataaataatttttattaatattgctctagaaatacaaatttttttatttatcattttgattaaaggttagctggccataatatggtctatttatggacattagacatcttggcattcagttaactcatcagctgcagtgtattatttcagatactatgcatttaaagtcaaaatttacattaatctttctaaaggattcacattacattaattgggatgattcaacattgacagttgtttcacttttcttaacttataaatgcaataaccaaatgacaaggagtggtgagtttcagaagaaaatgtgaaactcacttcagtggtttgtattttattttggatattttaaaatgtatctttcattactgagctttaatatatgctaggcattttgctaagagattaacatatatctcatttagtgttcataataacttaatatagtatgtcctattgttttgctcattttactaatgaaaaaggtcaatttagacactccaagctattttctctaggttattcttcaagcaggtgtcagagcagggctgaccctcatgggtgtgagtccaagtctgactcaaaactactattctatattttctcaatatttttccacctaaacgtgcggaaagcaaatgatttttcatgagttctactgtaatcccatttaaaagctaaaaaactgatttttgctttatatataggaagtatgaatgaggacaatgtaattcaggatcagtcgacccagtaacccaatagaataattttatttgtggctcaaaacttcatgagatgtaattcatttgcctttgggtatattgattcctctagtcatttaactaacgtggaaattatttctgagccccactcaggggcaaaacatgatgctggacaccctaaaagttacaaagaggaatgagacactgtccctcttgtcaggaaccctaccatctagtaaggtagaaaagacataaatgataactattatacaaccaatgttaaatttccatacaattggtatgaatgagttcaagagggtcccgttttacttctgttcccccaaaaaggcctaatcaaggtttccctacctatacagtggagaatttagctcgatttgttaaaagcaccatgttaagtgcaaccaagtgttttgaaacaaatgcctctatcaaaccgaattaatagtttttcctcttagaatttttcctgttccagctcctaaaaaaagacttaaaaaggattattgattgacttgtcccattgtaaagtatgcacctgctgtgaaatgaagccatggagaaaaatagttgaataatttaacttttttatttgtaaagataatcagggtttttctgattacatcttaacttcataaatgttaaataacctatcagcatctagttgttgtaaattatgaaaaggagcattgcaaggaatattaaccaacgaaatccttgttctttagtgaacaagaaaatgtgttatggcagcttgtcattgtgcgactggtaactttgacaccaaataacaaaactgccatttgcacttagggtaaattggttcacttgagcttccactgctcctcttgctctgacataaatttatgaactcaggaactaaccaagtcgtgtggcttcccagctgactttaacaaatatgcccatttcatttcatttagtcatcagaataccagggggctcagtcatttcagactcattgcagatggtatagggtttgtaggaacaccagagactttcgtgtcacagtcctggaaattatgatagtggagggggcccactttcctaaatgcatgccagtgttttacgtgttcacagcttagaggagcattttctgtttcagcacctcataggtatatgtaaaggacatttatttccaattaatgaagaggtgaaaaatacattttctatgctcatggtttggctagccatgtttaaatctggattaagattatgtttatatttgacatgcggtagaagcacagttttgttccttcatcctctgggagtcctgtcctttttataacagaagttacttcttgaaggatgcaaggcctggaagcagaacagtaggtacagactgaagacataaagtaaaacaacctcagatgaattggagggaacgccactccaaattactgctaacaatgaataatacagtattttcgtaggaatgcaatttgatcatatccaagtacacataaaaaataaaactagataacaaaatagtgttacaaagacattaacttgaatgaatgtaacatttatttgtagttggaatagcaactttatatgaaagatggattcaaaagtgtttgagggcacatggaaacagtgccatagttgttttttgttctttatttcattttgttccattttgtcttgtagagatgtcagccatttattaagtactttctatgttatgggaatatattgaaaggcttacagatattttctaatttaatcctcacaactctctatgaggtagctattagtatcatcattttacacatgaagagacaacatccatagaggttagttaatttgccagtggtcgcttgggaaataagggcagcagaaggatttgatctatctgacaccactctgtggtttgtctagttcaacaagaatgatggcatgtttcttatgaatgtgtgtctgtcaaacttttctgcaagaactgtcctaggaacaaagaagacaggatgaatatgcaatcccaggaggtctgaaaacagagcctgaagcaatcatcattagcttgcagtttctttaaggtcttgctttttatcttaaaaattcatgtaaatttgccattgtattccagtgtttgtcttcatccaaaaaataatatattatacaacttatcatttgggaaaacattttctactaatctcattggctaaagagtgataatgctgttatatttcatgatattaggaagatctaaagaaaactaagcccaataacaggttcaaggtcccggcaattcttcccctcttcattttgtcataaatatgtgggttcaccgtgaggcagaggttgcagtgaaccaagatcatgccactgcactccagcctggtggcaaagcaagacttcgtctcaaaaacaaaacaaaacttgggaggccgaggcgggtggatcatgaggtcaggagatccagaccatcctggctaacaaggtgaaaccccgtctctactaaaaatacaaaaaattagccgggcgcggtggcgggcgcctgtagtcccagctactcgggaggctgaggcaggagaatggcgtgaacccgggaggcggagcttgcagtgagccgagattgcgccactgcagtccgcagtccggcctgggcgacagagcgagactccgtctcaaaaaaaaaaaccaaacaaacaaacaaacaaaaaaaaacaaaaaacctgtggcttcaaacaacagccttttattcctcactgctttactgttatggcagggtaacaatagggagaaatgcccaaaatgtgatatggaatgctttgtcattctaggatactctggatggaaatttctatcagcatatcctcctgctgaaggtcaaattgcaaactgagagggtccccgattccttcttcaatctctcttaccacctcaagcaacaccctccaaaaaatactttttgcggagaggaagaagaaacctgattatattactttttattttacctctggcacagtacttaaatttttctcatccattaatgaactgagtctcaaatggtctctataatcaattctccttatccagctctcaaatttcattttaattattgcagtcttgttgagagcagtaaaaactgccagttttgtcgtggagtggtgaattaggcctcgaagaatagcctttaaataggcctattatgtgtattcaccataccagtaaagagaaaaataaagttattttttaggcatttaatttttgttatgatatcttttcctgtttctttatggagaaaaatagtatagaactctttattacctgaaacaaagtggaagtgtcatgggtcaggccaacttttcatcccatgtctagggtagaaaatccacattgagttcactttaaagcaatagcgagagactaacattacattgtcctttggttacagtatgaacagttatacttgttcagcacactggcacatcagcataaacattttcttgtgtcctacagttggttcattctgtggtgactacagagtcttcaactctacaattggctagcaaaaattctaatcactcaccatacatacaattctctaatcttgaacttttagaaagaaaaattcacacccaatttttgtgaacaaagaaacggggattctgctggttccccttcctcaaacagggaaatcctgtgtttcccaaattttccatatcaaagtgatactccaaaaaaaggcacagtaagtccttaaggtcatgataggttcttggaaactgcaattttgagtcaaaagatatataaggaaaccaattttaccttaggctagttgatataagcaagatttaagttgcaaggaatatttgtggtcacaaaaacgtcaccaaactaaatatcatcaaagaaagaccaaaacacttctaatattaaactgaaataaatatgagctatacatacatttaagaaagattaatagaaacaagtaagatcatttttaacctaagttttggcaagtcagcgagtgacaacagccatagggataaatgtttttgagcagaaattagaagaaattcttcttaccaccatgcactagtaaaaacaatcgcaagtagggcaagctcacagaaggcttttgtacagcattatttattattatgcatctatatgatagtaacacacttaatgaatctttactttacaattattcattcattcattcattttctgacacaccttttccagttcagggttggggtggccagggcctaaccaggcagctcaagaccattccgttacagggcacacacacacacccacactcgctcagactaggaccattcagacacaccaattaatttaatggaaacatctttaggatatgggaaaaatccagagtacccataaagaaaccacgcagacatggggagaatgtgtaaatttcacatagacagtggctccagctgggaatcaatttttttcctcataaatattaatgaaacaatgttgaatgaaacaacattattcgaggacctacggtactatgtttgttcctgtctttgaatatactttgacatgagcccacaaacctccaaagcaggtgtatttcaggttgggatacttggtctgcagaactttaaatttctacctataatatgcttgttccatcagtaatgatttttacttatccatcatttgtttccttgcttcggaatagtctccaagaatggctctgccttactgcacaaattttctcaaacctatcttgtcatttttccccaagttgtcctactctaagactccattatcaaggaaaagcataagtatattgatataagtgttgatatcagatgggcctaagttcaagtccttgcttctccaattaatcagtgtgcaatctggaacaagttatttaacttctctgagttttagttttctcatcttaaaaaatagtaatatttaccatgcagtattgtcttgagggttcgttcattcattcaatcagctaacatttattgagctgctactttgtgctaaagtctaggcagtggaaccacattggagaaaacaaagtcctaatttatacggttgacattctagtagtattaaatgggataatgcgtgttgcctggcataacacagggatgcattgaaatgactcttgtttgtactacttctgcaaacattgtaagactttcaaactggtttccctatgtcttgtctctcatgtttttaagccactattcatttcccaacagtgttatcattctaaaatataggtagactcttattttcttatttatacctgcaaagtctccttgttgctgattatatatgaagcccaaatttctcaaagaattaattgataaaatttagtagtcacttgagttttggagtgaagaaggcaggatccactctaaaagtcttactctaagatttccatcctaggaaaatgggaagatggtattatgacttactgaaagaggaaacctaggaaaaagaacaggtttgggagtggaaaatacagctagttctgttttagaattgttgagatcgtggcctctgaggaatatccatgtagaaatacctagcaggctgttgaaaatacaaagctgtaataccggaaagatagaaagctagagataagagtttaggaatcaatgatagaatgttagtagtttaacctactagaataaatgtaccagatagtttagccatgatgctctaaatttaaaataaacattctcagtctaagctgccaaatttaacgcaatctagcacctttcctgaggaagcaattgatcagtacttctgaagatgatcaatatctccttcagacacctctttttcatctatcctacacaaaatcctgagcatctttggtttgtaccagctcttccactctgtaaatacagaggccacatctataaaaagcaaaaccacatttcattctttagacctcatctctcttaggtcattgagtcctgtgcttcctcagtaatgttatctctagattccactgtttctaaagtaaagatagacttatgtgggtactacagaagtaaataactaaactcataaatgttaaaaactctcagatcaaggagacaatgtaatagaaaatgccattatattcttcattcaaaactcatatcctctccttgaaaaagtatgcctgttgttcatgaccaaataaaacttaacaagcatttaattatataaatagactttgacgaggctaaactgacaagacctactttctttaggaaggaatggtgaaaaatgacaattgttgaacccaaattttcgctgtatttagggccataagtctcactgacagtgaactgtcctggcccaataattaatgcactgggaattctctaggtagaccatgatttggatatttcatgggctatgtcaaggatccatgtcagacaggaggcatacacaatgctctacagaaaaattattgtcacaagcaaaattggtgttgttttctatgaactttaaaagtaagtaaacctagaaaaaatataggacagcataattgccttatatgttttaagtgaaatgtgccttcatttttatttgccaatagagtatatctttaaatagaaatattatgcttttaaaaatagattatgtacatttcttacttttggaatacacaatctaatatttgccaacttaacttttgtgaagcttttaattgctatattaaaaagtaatttacttttctattacaactttttttttttttttggaggcggagtctcactctgtcgcccaggctggagtgcagtggcgtgatctcagctcactgcaacctctgcctcccgggttcaagcgattctcctgcctcagcctcccgagtagctgggattacaggcacacaccactatgcccggctaatttctgtatttttacagggtttcaccatgttggccaggatggtctccatctcctgaccttgtgatcagcccacctcaacctcccaaagtgctgggattacaggcatgagccaccacgcccggcctcaattacaaaattttaaatagacattatttttaaaagacaaacatttgttgcccattctgttttatttatatatatatgtgtgtctatatatatttatttatatatatatgtgtgtctatatatatatacacacacacacacacacacacacacacacatatatatatatatatgtttttaatgttctctctctctctctctctttaaagggatcctcatccccgaaattcctgtggagtacaatgtcttactcaatgatggaagtgtaacacctctggccttctccgttggtcatcatcaatccacccttctggaaaatttgactccattcacacagtatgagataaggatacaagcatgtcaaaatggtgaaagtctttcagacacttggcctgggcttttatgaaaaagtatttcattaaaaaatttcattaaaaaggaatacattctcagtccaaatataaagactaacgtttcacttcttatttgtagtggactgtttacccagaaaaatcacagtctggcatcgagtaaagcattatgcatttctgcacattaaatcataaatatttaaatatattaaaatggtggttttgcaaagtcttgttttataaggccctttgaaagaaaaacacctagctcacataaaggagtctttggtaatataaaacaaaaatgagtattccaaatatttcatagaaaacatatttaccttggccttatttaaattttatccaggaggaggaagtgagaagttatttaagagttgaattacacccaaatgaatcctatatattttatagtgcttccttgaaccctattcatatatacaaactatcaccttgtgtttcatggcttaggctgtggtcagtgaaattttcatgtatctgtgttgtgttaaggaaaagcctcccccatttcctttatcactccaaacggataagtagctaaatgtaaactgtgatttaggaggggagaacagggaatcaagagagctatacatcattttatttatctcttttaaattaagtataaactttaacagatatggatatgttatatatgtgtatatcatatataacatgatatatgtgtatatcatatataacatatgatatatatgatctcatcatatatgttatataacgtataatactcatttgctaaataaagaaaacatgtaacttaccttagtataaaaaacattttgcttcaccttaaagaaatttatcagactcaatgtgtagtggaaactcctgtattgaatgtccttaggaatttctgtttccaaatagtgctagttctcatggagttggttagaattatgagtctgcaattttgctctgctgaactcatcagaaatggctagtcagtttgtccttttttctctaaaaaatagaccatggcatttttgtttgaggggtattgctttctctgatctgtcttcacctgataaacgtgaaaataattttaaattaatgttttcttgactcaagtacaaagtcaacgtctgcatctccgtgtccctgaaactgtgcaatggaggtacaatatccttcaaatagattgttttattcctgtgtgtttgaataatgttcatgagtttaaaatattggcaaaataaaatattattaaaagcatgcaagatgtgtaggtcacacatacacttgtgaaattcaagtgcattatcactttctggttagaatgactataataaactagagaaacttgagttcagacaagtttccttattattccttatttccagacaatatgccttattgtttatgtctatataaatatgtgactaattaatgggttttccaaaaataattttctatttaaatgttcaaatcccataaaaatttatttaaaacacatgtacaagtatatatgcaaaaggacaggttaaaataattttcatgatatcattacccttctgtatgaatatgtagttcttttccttgcttgaaaaataataaagacctcaattttttttttttcaaggaagttgtggagttagcagtaggatgtttgtcaaaacacctgaagcagccccaatggatcttaattctcctgttcttaaggcactggggtcagcttgcatagagattaagtggatgccacctgaaaaaccaaatggaatcatcatcaactactttatttacaggtaagattggctgttactattatttttagttatttaagaatgcgtactgctccaacacagcagaatcaagagcattttatatttccataagagaatgaatgggaattcatgttgtgtttttttttgttttgttttgtatgtttgtttgtttgtttgtagcacctaccagtgaggactaagactggtgctcaaacttttacaaattaaccaaggaaaaaagccataactgccatataacatttttgattgagatctgtttgaaaactgagaccttatagcccacataggcttatatttagtgatggggcagaacagtcctctaaagcaggggttcctaacccccaggccacagagtccgcggcctgttaggaaccgggccacacagcaggtgagtggctggtgagcaagcattaccaccggagcttcacctcctgtcagattagtggtggcattagatactcacaggagtccaaaccctattgtgaactgcgcatgtgggggatctaggttgtgccttccttatcagaatctaatgcctgatgatctgaggtggaataatttcatcttgaaaccgtacaccctaactgcattgccccagtgtgtagaaaaattgtcttccacaaaaccagtccctggtgccaaaaagtttggggaccactgcttaagcagctcactgaccaagaaaacatagtctttccagagaggaaaccagatacaagacaagaattctaatatttctcattaattattatgtagagattaaaaagttttttctcctcctccaaagatggtgcttttcataagcagaaaaaggggctctcctctccagttttccttctgttttaatgagcctccactccactggttagatggtgttatagcaacttgttccatcatgtgcagaatttattaagtgtacctacctaaaataaagaaaagagacaatagggaagagaggaagagaaagattgaggaaaaagagagacaaagagagattgagagagagagagagaaaataatggaagagagagatacactatgaacattttggtttgaaggatattttgctctctgatctagtcttcaccagatcaacatgaacattgctttaaattaatgtattctttaaataaataatgaatgaggaggagaaggagcaggcaaaggaagagaatgagggagagatggagggagggagagaagaagagaaaaaatagagaaagtgaggggaggtgagtagaaagtacaatgcaaagagccaagggggcaaataacctgtcaactgatggcttgctacttaagacagaaaatacaatcattggtagacatacaggacttgcagattgaaaaacccaatcccattctgaaagcaatgtatttcctttagcgtacaaagcagaacacccttcttctcagatcctcataccccgcacctcttcaacatcctttgttagtgtctctagcagcctcaggccttcccttatttggtcctatgccctggaaacttagtgaaacttacttaggctcctcttataactttagatattgaaatcctttgattcacatcagtcttcagtgatgagctaagggcttatagaaaaaaattacgaaaggagaaagtattattgcatttctggttatgtaaatgacattaccaaaaatgaacaagccaaatttcttctcagcaaacattaatttgaagaataatatttctgattcaaaaacacatgaacacgtaaaaatggttaatgtgaatttccattttacgctaagcacattagtgcaggctctaaaatgtccaccctcttgaaatagttttctttcatccacttaatgctaattgcatgagaaaagcacatcaaattcctattcagaataaagggaaatagagtatctgttatagaccaggacgtggcttcactctgttggttttgtaaataaagctcgtgattacagtgcctattccatggcagctatagagagggaaaacaggaaatataatgcagaaagcccgcttcaatgaaaaatactgtaaattgaatttgacagcatttgatggcatctgattattctaatcacagccaaacaatgatataaagagtaatatgaaacagaatgtgttactgcctagcagactcaaaagcaataaaccttcctccaatgtgacacaatcacttcacaatcataattgtagcctgtttgatacctctgagtacagcagaagggcactgactgacatagatacattttgttttttatttaaagtgaaatgaaaatggcgcactggggctccagatacaatcgttatattcacctacataggcatgaatcacttggcagttatttcaactgaagtttaaatgtgcttagacaacaacaatatcaaatttttcttagatagctgcaaaaaataatcagaaatttgtaaggacagaaatagaatggagacacatagttctttttcattctgagactacatagagccctttatatagttatagccaccagcctgcagtatttctgaggaggttatggcatgtaatttcagcttcatcattggccttctctttcttctatcggcaccaaaggaagtacatttagctcaaaccaaagataggatttggcctatgcagatatttttattaacttgcaggaagcccacttgtaaatctcatttgaaattgtttgccactctcttctcaccaagaccctgaatcattttcttttctgtaactgtcctttattttttaaatatttcctctagatattatcctattaaaaaatatctgacctaataaagacagaagatgtttatgacttcaaaaacaaagcaaaataacctaaatattatcctattaaaaagcgtctgccctattaaagatagaagaatgtttataatttcaaaaacgaaacaaaataacctagtaagaacaaactattaatatgattccctctgcttagtttatctgtttaagctattttgttgactatatataagtcacaaaaaaagatttgctacaaaaagttttgtaaagaatagagaccaacatttaagttagtgttttgcaacctgtttattgactgagtatagacaagactgtcttggacatctgcttcctcctctcaatgagtttggctggtatgataatgattcttcagtattccccctttattttatatctgcaaccttgcaaatggcaaaaatctcatcacttacgtctacaaaatccatcaaacacattaaattgagactttacaaaacatgtaataaaataatctcctcccactaggtgctttaattttaatagaaaccaaatttcatggggtttattattctcatgagctttctctttaaataaataaaaagatttgatcaatgtgcactgagaggcaaaactatatacaaacaccctgtaaatgctgtaaaaatagaaacaaatgatggcacttccttctgagtatttagtaagatttaaaggataaaatctgaaataattttgaagactgtatgatatgaaagggttttcaaagcagataagtgaaaacattttataaaatggataattaagctgattgaattaactaagaaaagacgagcattgaatcaaaggcaaaggaattttgatgtaattcaatttgtattgggtggaaagatggatatagatatgaatatttatatagatagatacagacagaagacagacagacagacatctacctatccatacatgtacatatctactgagagagacacaaagatctatgagacctaagcccttttaccaatgatcttcactacagtgggagatataagacaggctaaataaacaaagaaaagagtaaaatatatagtggaaaaacagaaatatttaccagaaaatttagagaataattctgtgtctagaatattcatggaacacttcatcaagttgatgtcattgagactaggacttataaaataaagatttaatgactatttaaattgtaagagaaatacatttgttagaaaaaatgttttaacagtacagaagattactaaggttattattcattcttatgatttactcatggcatatgtaattttcactaatagaagtaacactattaattttaatatattaacattaatgttttctatttgtattttcttcttcatgaaagaattatattgcccatattgttctgcaattttctttgggcattttatatatatgcccacacacatatacacacctaatttcttttaatgactcatcaatattctgttatatggatgtgtatcatatattatttagccagtaccctgatgatggcaagataggtgattttcaagttttcgttaccacagcaattctctaataaatattcttacggtaagtatacagagaattattcttagtactagaagtactgggtcaattaaaattgttgaggatttgtctttactagaccatatgcatttaaaattgttgaggattcctaagttgtcttccaaatatcatatgtaagaatttctaattctgaaatcttttaatacagggtcagtcttccaaatctgtcagctcaatattttcatttgcacatttttgttgttttaattcaagttttgatgattataagtaagattgttcatttacttaaaatatttatcttctatttgggaggggtatgtataatatattataaattcttagactaattttttctactggattatttcttattgtctatattctttccacattaaagaaaatctccctttcatgatcatattaaaaataacacattaattatttcttccagcacttttatggctctactccttatttctaaatatggaattaatattgttattggaaattagataagaattcattttcttaaaaaatgctaactagtttatcaacattatttcataatccactgatttgaaatgtcactcatacaaaattcctatgtgcatcgggttcattttaggactttgtattctgtttcacttgtggtaaatagggattttaacaagtacagcctgatggtgaagacatgataagtgaataaaatcaatagaataagcaaaatttccaacacataagcataggattcaaggaatggtcaggtttatctggagtcattgctattagtaggggacatttagaagatcagcttaatgatagattttagatctaaggagtttaggctttatattcagaggcaatgtgagctgctgaaggtttagggggtaaatagagaagcaatgtaataaagtggaaagagtgtggcatttgtagtcagaagatatggcttccagggcctggctctaacacttactagttatatgaccttaggcaagtcactgtgttccctaattttccatttttacatgaagtgaagatagtaaatataaaagataattagcctcttggaattctgtaagaattaaataatatgtgtggaattactgttaaatgtgaagcatgataaaaatagaaagttatcctagatatgttgtccaaagccatgttttagaaagacaaatccatctggcagttatagatgtacatttaaagtcaatgaaagaggttcatggttataaaagtagcagcttgcataacagtatgcctggtaggattctgttttcctttaaatatatagtatattttttacatatatatgtatataaaaaaatgtctggaatgttaaacaccaaaatagtgctagcagtgcttatctccaaatattaggctatcagtgattcttttaaatacttctgcttttgttcatctgtgttttcttattaatttttatagtcaatacatcatatggtctagtaaagacaaaataataaatttgtgagcccagatgcaaatctatcatcactgtctccgattttcctatttccttctttgtgtgaatatcaccatcactttctgtaataatcaaagtctgatcaagaaagaggaaccacactacttactttaacagaaggaatttaatataaataattagtaagtagttataaatttgttaactaggtaactaaaagcataaaaagagaactctaagatatcatggaggtggcaactacaggaaacagctagcacctttagaactgagggaacaaaggggagttgttagaattattaaaatgtaaatgcatagaggagggtgcctgtgaagctgggactcagacagttgaagaggggtacctgccactggtgcagttgtatggaggaggaaacatgaaattaagttggttttccaaatgtcggaaaaattgcatgctgcaatcacttgctcccaaggtatttctttattgcaacacaagaacagcctaatacagaaaactggcaccaggagtagcgtgttgctatgaagatacctgaaaatgtggaagtgactttggaaatgggtaacgggcagaggttgaaagagttgggagggctcagaagaagacaggaaggtgagggaaaatttggaacttcttagagactggttaaatggttctcaccaaaatgctgatagaaatatggacagtgaagaccagactaatgaagttggagatgcaaataattgagaactagagtaaaggtcacccttgttatgccctagcaaagaactaggttccattacatccatgccccagggatttgtgaaagtgagaacttaagagtaaaaacctagggtactggtggaagaaatttcaaagcaacaaagcagcattcaagactttgcctggctgtttctaacagcctacaatcagatatgggagcaaaggaatgactcaaagttggaacttttatgtaaaagggaagcagagagcaaaagttcagaaaatttgcagcctggccctgtggtagagagagaattcaagcagactgtggagtgaccactttcaagagagactagcatcactgtaaggtagccaagtgttaatatccaagataatagggaaaaggcctagaaggcatttcagagatcttacaggcagcccctctcaacacaagcccagaggcctaggaggaaagaatggttttgagggccaggcccagagccctgctgccctgtgcaggcttgcgaactgttccccacatcctgactactcttgctgcagctgcagctcgaagggcctcagatacatcacaggtaggtgcttcagggggcgtacaccaaacccttggtagctaccatgtagtgttaagttggcagatgcacagaatgcaagcatgaaggaggcttggcagcttccccctagatttcagagaatgtatgagaaagcctgggtgcccaggcagaaggctgccacaggggtgaagcccttacagagaaactctactagggcagtgcagaaggcaagtgtggtgttggagccaccatacagagtctccatcagggcgctgtctgttggagctgtgggaagggggccacttctctctaggtcccagaaaccatggacagcttgtatcctgaaaaaagccatagggattcaactccaatatatgagagcagccacagggtctgcactctgcaaaaccacagggttgaagctacccaaagccttaggagtcagtgcttgcagcagtgtgccctggagtgggacatggagttaatggagactattttggagctttaaggtttaatgtctgtcctaccaggtctcagacttgtgtgggccctataggccctttctgttagccaatttctcccttttgcaatgagaatgtttacccaatacctatatccacattgtatcttggaagtaaataacttgttttgattttataggcttataggtgaaaggagatgagtctccagatgagattttagacttggtacttgagacttggggcttttgagttaatgctgtaatcagttaaaacttcggggaactattgggaggacatgatttcattttgaaatgtgagaaagagatgagatttgggaggccagtggtggaataatatagtttgtatgtttgtcctctctaaatctcatgctaaaaacagattcccaatgttgcagatggggcctagtgggaggtgattgcataatggggtcagatcccttatgaatggtgtagcaccatgcccttagtgataagtgtgttcttgctcagtttgttcatgatgggagatctggttgtttaaatgtctaggactccacccgccccccgcccccccgccacctctctctcttgctcctgctctctgcacgtgatgcacttgctctttcttcaccttccatcatagttgtaagcttcctgagtctctcataagcagatgccagcatcatgctttctgtacgccctgcaggactgtgagccagttaaatccctattctgtataaattagcttacctcaagtatttttgtagcaatgcaaaaggagcctaatacaaattagaaaaaagaggtagcacatagaaggatatgataactcttatttgagagaaaagcaaggaaaagactttctggaaaaagtgatatggggctagaattttaaaagacgagttgtagttagtctatagaaaaaaggagaggccaggtgtggtggctcacacctgtaatcccagcactttgggaggctgaagagggcagatcacaaggtcaggagatcgagaccatcctggctaacacagtgaaaccccgtctctattaaaaatacaaaaaattagccaggcatggtggcaggcacctgtagtcccagccactcgggaggctgaggcaggagaatggcgtgaacctgggaggcggagcttgcagtgagccgagattgccccactgcactccagcctgggcaacagagcaaaaaaaaaaaaaaaaaaaaaaaaaaaagaaagaaaaaaggagaataagaaagaggattgggagggatattgccagagaattagcagataccaaagccatggaaccgtgaaatataatggaatataagaaactatagtcaagcatttgatgataactagaatataaaatgggactagaaatttcagaaaggtgagtccttttgagaatcagcagattaaggataagcataggccattttacatggtaaatctctaaagaatttttaaaaggactgtcttaaaatttttgaaaggtttgtgatgtctcttccctcaacagccaagtctctactcacaccaaaaacttgacgattcaaccttcacaaatcattttgtaaatcacctgtgtttccatttgtcctctcagcaatctagttcagggtctgcatttattcttacgtaaactgttgagatgacctccttgttcaatgccagatgcacatcatctccatgataacttcattcagatcatgcattacattttacccaatgatttttatgttttaatttttataagaattttcagaggtttgttatactctatgaggttattaactccactttacaaaatgaaatagaaactagaggacacagacaggcaagttcacccaaggtcattgaactaagtggcagagccaggacctccaacctatctcctctgactacagatgtttctgattatctatttaaactcagaatatttgtaatattcttcatggaatggggttggcagtttcataacctcaaaattgttatggtgcattgggttctaggattttgttttaattgcttttgaaaataagcagtgacaattgctggaggggagagaaggagtaaggagctcctaaaagcattgtacattgagaccacagaagtgtgactgcctttaaaaatatatggttcctagtttttatacttatttttgttttcctcttagtgttaggcaacattaaattaactctagttggaaaattacattcctgaagtatctcccaaatgagcctgagcaaagaataaccatttggctattcagagagaactgaaaatgtgatttctctaaacacaggctactcaggaggaaacacttccagttaaatgaacaggtgatgcttaaatcttaaataattaggaataattgtggtctactcaaccacttctgctctaaatgtattcagacataaagagagactctgttttttagcagtgcagatgggacatgtacttctccacgatattaatttttcaaggattcaatagcgataagaaatacttaaccaggctgcaccttttaattcttttggtgaataaacttgaggccaacataatactcaatcttttaaatagtatatgtatttaaaaccccacttttaggcaaattttgttaagaatgtcggctttatagaaaccatgactacatctcaatttgggaattcgtgagagtttaataaaaattaattgaattgtcatggaaaggctgaagctagacaaaatagaaaatgttacttccccatagaccatcataggtttgtttgctgtattgtgttcctagcaaacaactttttaaaaatcactgagaagagtccttggctatgagccctgcagttctcattagaatggatctctcccaatgacacacctggtacctgatatctgtagcaagtacaaaggccaaaccctgcaaaccttcactgagtgcagaatctggttcacgcatggtagtgagcaataatgaggtgggctgccgaaccataattgcaggtgactgagaggtgtctatgaagcctctatagcttccagcatgaagcttgtcattgctcatacttaggtcatcgtgatttatcaacttaaggatcatcagattcccaaagccaaagattttacatattctgcctttttgtgaaaggtaactgtcattcactttgtcttaataaccctttacattttgatggagctggttaatctgatatggcagcatgtgaatttttcagcatctgaagagtgtgttaattaaatacttctaacagcctggaaaatattactgtattcatcactctcttctcaactagagagagagctgaaagaggagggtcaatgtcttggttacattctctcccaacctggaatactgccctgataggaaataagagctgatggagaagaggcaaagatgcagggaagtaatgggattccataacttttagcctttcacttgaaaaacatgattgaacacttactgggctcagatgctgggaatatagagatatgccaaccacagttcctccagaactttgctttccatcaaacctgcatcatgtttttacatctggatgagaaaagaactgttccaaatgaagtatcagatatatagggccgtctcaacaactcaccattccatttctcttacttctatatttaatgctatatatatttagtaccaaaagagtatgcatttggccctagtttccctatcaacaaaatctaaagatgagcctaaacaattccatcctcagacagttgaaagaattttggggtcatactctgcattttaccaggttttggggaagacatctaaaaggaatttgacttttgtcctttaaaaatctctaaagcaagccagacatggtggctcatgcctgtaatcccagcactttggaaggccaaggccagaggcttgcttggggaagaccagcctgggcaacatggcaagacctcatctctacaaaaaaattttaaaagttagccaggcctagtagcacacatctgtagtcctagctactcaggagactgaggcaggaggatttcttgagtccaggagtttgaggctgcagttagccatgattgcatcaatgcactccagcctgagtgacagagtgagacccagtctcaaaataaataaataaaacaaaaaaactctaaaacaaattcctattatattacttatcatgttattttcattaatctgcacatagctccatcttctctactcagctacctattcctttaggtaaggggtgtgttcatctttttacccttgtttctaatacaatgatgggcatataacagtgcttaataaagttgttgatgtataagtacaataaatgtagaaaaaacagtggtcttgatgtataagaaaagattgtccatactttgagaggttatggtttaaattatagaagagaaaattcaaatgaagagaaattaagtggcatctaagaagtgaatttaaaatactttgtaaacatcctgggaacaattgcaaaagagcattgtgctgcatgagagaaaataggaactgtggacttcccttcatagttcttcatcatccagtatgccaacctgggctttttcacacagtaattttatggtcctaagagcagcaaaaggatcatcctcaatgtgcaaacacttttgaagtctctgcaatcatcatatttgctactgtcccatgagccaaaaaagtcatatagccaagctcagagtgagtttacgagcatactcgcaaaaggcctggatacaggaagacaaacacattgggaccctagctgcaatccatttatcatagaagggtaaggattcccaataatagcttctactaattccatatcctgtggttccagttgtacaaaaaataaaaccccgatataactgcatgcatacatgcacacacacacagacacatacacacagatctggaaaatatataaaaatgcattaataatgtttaatatatgcttctgtatttttaaaagattttaaatatgtttgttttcttgtattgcatatgtatcttgttattcagcaaaaacatctggaagataataaaatgtgattttggatgaggtttcaccttttgtgctttttatatttcttctgtgttttccatgttttctacaaagcatatgcactcttttataatcagtcaaatacgtgtgtgtgtgtgtgtgtgtgtgtcaactacactttaaaaatgatatggagttaggccactggagtacttctccatctggtttttctttactatgacaccaggaagaaacagctgaaaagttaagttgataacaaattctaaaaaaaatgtttttactccatctacaaactttgttttgaagtgtgcagctgtcactggttgcctgcttggtttcctttcagacgccctgctggcattgaagaggagtctgttttatttgtctggtcagaaggagcccttgaatttatggatgaaggagacaccctgaggcctttcacactctacgaatatcgggtcagagcctgtaactccaagggttcagtggagagtctgtggtcattaacacaaactctggaagctccacctcaagattttccagctccttgggctcaagccacgagtgctcattcagttctgttgaattggacaaagccagaatctcccaatggcattatctcccattaccgtgtggtctaccaggagagacccgacgatcctacatttaacagccctaccgtgcatgctttcacagtgaaggtaagaccctttagaaaagtaacagacatgcagattatctggtgaatacgttgaaattaattttcttgtccaacttctcatttttcttcacttagggcttaaatatatgaaaatctttcacttgtgaaaagttgcaatgtagtcacggggataagatactgaactgagtatgaggagtattggagaccagtttgtagaccacgactaattttgattacctcaaaaccaataaataaattttatttattcataaaattgcctgatttccattttccatatttactaagtgggaatattttttttttgagacaggctctcattctgtcacccaaactggagtggagtggcgtggtctcagctcaccacagcttctgcctcctaggtttaagcaattctcctgcctcagcctcctgagtagctgggattacaggtgcccaccactgcccaactaatttttgtatttttaatagagaggggttttcaccatgttggccaggctagtctcgaactcctgacctcaagtgatctgcctgcctcagcctcccaaagttctgggattacaggcgtaagccactgcgcctggcctaaatggaaataatttagtcttgatttccattttccatgtctactaaatgggaataatgtaatgctttcctccatacctcatagagatgaggttcagatgaaattagacagaatatttaattttctacttccccaacaagctagtataatatatagctatatatatatgtatatgtatatatgtatgtgtatacatgtttgtgtatatatgtatttgtatatatgtgtgtatgtatgtgtgtgtatatatgtatttatgtatatatttaaatatacacacacacacatacacaaagttgcatacactatggcttactggtgatttttttcagggatggcttcctctggcccatagaacgacttaattcagttcacctgagcacttagtagctcctgagtgctttctttatgtccagcataacctcatggtctatggaatatacagaaacaggatggtccttgtcacagggagtgttccgttttataatattgcagagatgagaattgcacataaggggaaaagaatgagaagcagttgagtacagcctataatgtccactacactgagacttagatcccgaactccactatctactagctttaaaccacagtacaagagagagtaacatcatataccaagtgttaggcaagaaatgctctgggagatcaactctcaaactgaagatgcttcatggataagattaaattttgtggtcttgggagtgaaatacaaatatgtgccaagaccttattaaatatggaaaaccctcaataagaacaaataaacagacaaactaaagcatttataaaaaaaccaaaaaactatgtttctatgctttaaatcctggaaggccaatttacatgaaggttatcttatggaggataacatttatcaaaatatttaaattacagtgagcaaatatattttcattaaactccagaagagcccttttaaattaatagtttaaagtacaatgttttcccactgtcctcatgtttaattttctcatatgactaaaaaataagcaatatgtaaatgaaaggataattgttttatcttcatttttatctgtttcagaattagtactatatttttattagatagtaaattatgtactagagtcttttatattatgtcttctagttcctatatgataagcattagaagcagtgttcttaagtgtaaaagatactttttagtggatatgtgatccaggaggaagttcgttacttcccaccatatccttcaaactcatgttctaaactttcacccttaaagtaaaacgtttatgagtatactgaaacacccttgttaatagctttctgaatgaggcaccttaatttaaatatgtttttattgaaggcatcaggattataatgattaaacctctgatcttttaaaatacaactttcaggggtaggagcctaataatcatttagtctcacgaaacagttctattggaattcccttgtggaataaccctgtaagtcatcccttcataaccagcttcattttaaaacacaagatttaaagtatatgatgaatccatgaactctgttctttatttaatcttctaggctctatttttatcacactaaaaagcttctgaaaagaggcaagtgtatggccccaagctttaagcggcacagggctctttgcacatgggccctccctgatgtggctttcattttgacagtccagtactggtgtgcttttctatttttccaaagattttttttcttgcaatgtcgaatagattagccagaataattttaaaaacaatacttctgtgtcctatttttgaatgtgtatgtgtgtattcaaagtggcctcccaaaacctaaatctttggctcttagaatttcaagagaaggcttcattagatacaccaagaaaggtcccacctgatcttttcaagcaaacaaggacatcttccacaaagcaatctaggcaagtgttcagaccttctggccactggaccacgttttcagggcatcagggcaactatgactctttatgatctgacacctttgaaggaagtcatcaggaaaatgaactagtgtttttgtgtttcacttattcccacagtccctgtgtaggagattgtgttcaatatttttgtttaaaagatatctaggccagacgcagtggctcatgcctgtgatcccagcactttgggaagctgaggcgggcagatcacaaggtcaggagttccagaccagcctggccaacatggtgaaaccttgtctgtactaaaaacactatttttagtatttttactatttgagaggctgaggcaggagaattgcttgaacccaggaggccacggttgcagtgagccaagatcatgccaccacactccaacctgggcaacagagcaagactccgtctcaaaaaaaagtaaaggaagttctattacttatccagggttctatactcctcaccgtcacagaagaatgtttcttttatctcagacaaatcctgcctcctataatttaagtctatctccctttgttcagagcagcatgacttctccataatagcacaaaggggcttcagggtccaacaaattattgacaattcaatctgatttggcaaataaccattgagtactatattcaatatgtcaatattgaataccaaacttaactatgttgttgaagtctactgtgagacttggcccttgagcagagcagagactgtgaggaagaatgagtgattcgttctgaggcacaggctattactgttgggcattttgggtttttaagcttcttgcagctgcgtttctgctgcccatgtttagaagaccccatttcatttttatttttgtataaacttaatgggtccaagtgaagttttgttacctggatatattgtgaagcagtgaaatctgggcttttagtgtaaccgtcgcacaaataatgtacatcgtacccatcaggtcatttctcatccctcaccctgctccctccctccctcccacccttccgagtctccagtgtctattattccacaccctatgtccacatgtatatattatgtagtcctacttataagtgagaacgtgcggtatttgactgtctgtgtctgagttacttcatgaggataatggcctctagttccatccatgttgctgcaaaagacatgatttcattcttttttatggctgagtagtattctacagtgtgtgtgtttgtgtgtgtgtgtgtgtgtgtgtgtgtgtttcacattctatatatatccatatatataattacattctatggtgtgtaaaattattcctatttagtaaatatggaaagtggaaatggaaatcaggagatatatagatatagatatagatgatatagatatagatatagatatagatatcacattctgtttatgcaatcatccattgatgaacacttaggttgattcaatatctttgctattgtgaatagtgccgtaatacacatacgaatgcaggtatcttttttaatataatgatttattttcctttgggtagatgcccagtagtgagactgctggattgaacggtaattctacttttagttctttgagaaatctctatattgttgtatattgagaaatctctataggggttgtagaagactccattttaaatcgcatcccaagtacttccctagatctacttactgtttatctaatttctgcaccaggtaaacaactttactgtcttctttcctttctgtgcctgctgtaggaaatttttcaagtttttgtttattggccactctggctaaaattcttcagggcaaaggaactacagaaccttctccattaatgaggcacagagtccatccccacaactgtaggattgcagttcagtccacaaactcgcaagaggtactgctaatgcattagtcccttgtttattaagatctcatctctgcccaaggggccatcaataaattgcccatgttgtggtgccatcactagcttgccccaaggtccccccagagttgtttatagacaggtggatgttgctgagagagccacataaaacaggtgcaatggaggcatgaattctgcttgtggtggcagtggatggagaactggcagtgggggccctccgtgggggtgagaagcgtatgtgttggcaggaacagcagcagcggcagcagcagcagaggcagcaggagcagagaaatggaaagagtgtgggttttaatgcatcactagctgctctcccaacctcatgaaaagtttcacctccctactcatctctatgtaggtctttctaaggaagaaagagggagatcaagattcttggggtctctttagaccaataccttccattattgaaaacagctttaattagaaggccttaaactcccttcccaattagctctgtgatgaattgtgcggtgtcaggaaagaaactgtatttagccttgcttggcatgcaggagttccatggtggtatttacagggaacactcctggcaaggttggcgatattgctaccaccatttgggtttgtttgctttttctcactggcatctgccattgtgctggcagaaataaatctgataatttgggattttaaagaaaaaggtggtttacctattatctgtgccctaactatatccttgcttgttccacggggttataaaacgtcaagcccagatcatgcatttgcccagtatcctaaaagataaatggtacttcactctgtgtagaatcaagcataaggtgctgagaaataagcaaattatatgggtcactaaaaattggcttccaatctgggaataaaatccagaattactaactctagtttctagattctagttgccaggcttcctttcccaatgtcaaggaggaggtagtcaaaatttcctcaagggtttgtttcctatatctttaccattaagtagatatgtggcaaaaataataacaataataataaaatagatatttcacaattgccatgttatgaagagtgtgtgagtaaattgataaatttatttttaatcccattttcattttggcttagataacataaaatattactgctctttacatatgatcttaaattagtttcaactctttttaatttgatgattcttagccttttctccccagacacatttattagacaacagaaatactctgggagatgtagctttctaaaaggactcctttggtgactatctttctaatgtgaagaaaaattcagtaataaaaataattatcatatttcctgggtcggttctataaactgagattttcacattttataataagaaataactgtgtcattcttctatataaaagatagaaaacatgggtgagtaaatatcacacaaaacaatgaatatttgtcggcctaaccctttttttttttttttttaaagagacagggtcttgctctgtcacacaggctgcagtgcagtggcaccatcatagctcactgcagccttgatgtcctgcactgaagtgatcctccctcctcagcctcccaagtagctgggactataggtgcatgccaccatgcccagctaattttttaaattttttgtagagattgtgtctcactaaattgccccagctggtctcaaattcccggcctcaagagatcctcccgctgcggcgtcccaaagtgttggaattacaggcttgagccactgaccatggcaaaactttttagttgtgatgatattttagctttaatatcaacttttcatttacttgccttacataatctttaacccttttgtctaatttgggctagacaaattagactttcagacaaatatgtatttgtctgaaagtcataaatacatataaagaatctaccttttgctcaacattattggggatgaaaaccatgtaagtcttttgaaatttatgtaattacatctttgaaagagccatatttttctccaaccactttatcccagcaagctccatcaggattcccttgctcacccatcagtaacatctaaggcaggtcccatgattttccagtcacttttcagtggcaaggatcaacgcaactggtgattaagactcattccaagtgttttttaaaaacttcagtctagactgggggcgatggctcatgcctgtaatctcagcactttgggaggccgaggtgggtggattacctgaggtcaggcgttcgagaccagcctggccaacgtggtgaaatcctgtctctagtaaaaatacaaaaattagccaagcatggtggctggtgcctgtaattccagccactctggaggctgaggcaggggaatttcttggacccgggaggtggaggctgcagagagccgagattgcaccattgcattccagcctgggtgacagggcaagaacctgtctcaaaaaacaacaacaacaacaacaaaaactccagtctaaattaaaacctgatatgtgcttaaggatctgcagtggggaaagagggcatggtcattttcctctttcttcagttccctcttctcttatttatttccccaggatcatggcatgaaaagaaagaattagacaaaaaggaacagagctttactcaataatattgctctaattaatcttctattaattttgagggggcagatgcctcatgggattttctctgtgggttatataggggtccccataggaaattccatgcctcatagtcctctgatgcaggcaatacactctctggctaatttcttactatttgttattgtccaagaggtccaccctacaacctttttttgcctctgggggcccttctcccaagcaggcagccaatatcaagtcctatcacgttgacaaaactcattcctttcttggcacccactaggattgcagaaaactttggtttcaccaaataatgaaggtacagcttgtccagtactatattctctgcttgacctatcatgctggatgaaacctagccagtctcctaactttggaattcattgactaagacacaggtattagcttctgtgctagcctattatcccaaaactatgggatcacttaaggatttcagaagacccttttgactctagtcattgcatcaaaattgtcctatgaatttcatcagtgcagtaggaagcctcttgccaagaccagactgttcatctcacttttctggcaacactcccaatttcttcaagagcttctcttggatattccttgcatgccttgaaaggggagtgtggagaaatcccattccctccctgaagtgggaaagatataaccaaagcctctttcttctccactgaatccccttctttaattttttttatgaacttggatcttctcatataggttgtctacatagatcttcataggaagatggatcttgaagtctgttttttccataagtcatgcagtgatatgtctagctgttccagtagagttacttaccacctatttttctaaatcatactcattattctccaatacagttctgtttcacatcctattatataactaaatggccctatcatctttctagttgcacaagccagatcatttttgagtcctctctcttccttacttccatatcaattcttcactaagtgctattgattctatttccaaaccatatcttaaatccttccacttgaagacaacattaggatcttcacacatgttaatccctcctcctggaatgatggctcattctcctataattcatctgtcctcattcttactcatcaagtctgaactaaaatgttgcttatctcatagggctgctgcaatgactaataaattaatgtatatgcaaagtactgtaaagggcaatataaatagactataaacctttagcagtccttctttttgaaaaaacagagactggaataaattagcaaatgtagataaggttctggtttgtctaggcaactgtactaatttggtcatgagtgaaaaaccttatgttttatacattttaagtgttcctcaccttgcaataaaattctgagcttgcaaatttacatgtttcctgataccacattgttaatttccctgtaattttccaaatactggattaggttctatttcctttctaaactgcctgaagcaagaacatgctttttttttttttttttttttgtctcctgaggtttattacggtcttatccctggcccccctgccccaacaacatcacatacctgccagtctaagagccctcctcaggagatttccaccctatatgtagttctctttacctgacatgacactcttaggaccctaccctttcccttagatctgggattatatcagcagaacatgatgaggtattttagtcacacacacacacagacacacactctcacacttctcaaatcatacaaatggattctgccaaattggcatctacctacttcccctatgccaaatagtagtttatcagtacatgagggacagttagttggtggggagactgtttgacctgtgagtcaagtatgttgctattttctggcctttaaccaacttacaaggaaaccctctttagacacctaagactcccgtggagccttgtcaaaaatgtctgtgaaagtaaaatgaactagtccacatactaacaggcccaggccataaattcagaatatatgccatttagcagagacagcaagctgtaaatggcagtgaagggcagaagttaattgaactactctgctcttgtcacagatggaaagtagccactacctgagacaagatggctgccccgaagtaccctattacagccaagagatcatatccttagctctgcaagggcttatgggtgagggggaaatcatacacagatgaccaatttttttatggttcacagccgataaaagtgaaattcagcagctgttcaggacaagtgaccactgtaacagctgtaatataacctactaaatagagagggaattgcattagagcaagaggttagctgtgatcatcggcaggtgagtgctttattgaagttgaaagaccattaacattgatagagtaattatttcaacttgaaagtaattaccttgatgggtgataacttctctagtgttcccagatttgattgggccaaacaattgtgagctcctgaagcctagaaaaatattacaacaatactgtgatttttaaattactgaaaccactgttggaatattctaattatgccgaacagtgaaaagattttgccttacacaagctagtgacctctcatgtagagagagacatttgctttttaatccaaatgcaatgacccacacccaccacctgtgaatacatatgtgatgggtttgcaaatgaatctttttatctcaatataatttttaaggtgaaacatcttgttagtgctgtgcctgggtaatagtaagctagaactgctgacatttttgatcatatctatggacttgaagtctccagaatggcaactatcttctatctttgtcacagagggtttaaatttgtataaattaaatattttgataatgactacacataaattagaatttctggatgccacgtactttggatcccaaatttcagatattatctagttacataatcagttgtttaaataactttctcgcctgatgttatgcaactccactacaaacactccattgtcagggtattttccgtttacctacactggacatcagcaaacaaaattaaagttgaaaacctgggctattgcttctctgtagtctcatgaatatatgaaaattgcaagttatttgcaattgagggccaagacacatcaaatctaattcagtgatcaagaccaagaaatacagggctcttccattaatcagtttttcaccatatttctcttttgagaatctacttggtccagaagctataacagatacaaacaaacgagaaatagtcttttctctctgaaactcgtcgtgtatttggagaaacaataagaaaagagacaaaatacaatgtaataagcaatcattttgtcatgcatggtattgattgtacttataaatagttacaagaacctaggaagactctagcccatactcctgaatccaaacccagcactcattctatggaaccacaaaccattgacagaaaaaacacaggcatcatgattcttagtcatgttgtcagaaaagatgaatgtgacatcaccttaaagttcctggatgattccgtagacctttctatcatcttggcagggtttgatcagatgatcagccaatgaatgactatctttttggcggcacttcccaggagttttttctaatcaaaatctcagactctcctagggacaaaacaggtttctacttgttgtctaagagccaataaggaatgttttaccaagcagttaatgggtttctttcatctctccatctcggctctgaattcccctccatagacaaagtctttgggtctctgtttcagaaattaccgtagggtagaaatctctgccaagccagaagacatttgcccactggaaagtaatgtaactggcttgaatttggtaaaagagtgaaggtttgagacaaaaacataccacttgggaaagtgataaaaatttatgaattgaattgtaaatcttgccattaagccaaccaaagagtaacaaaatctgaccaatctgacagcacatcagagttcttagcacagcaggctcaccatgtgtcatatacagccaggctaaagattgtattaaggacccccttaggtactctgaatttaaaataagtgtaataactcatttttaaacattttatatgatacttgaattattaaatattcacattacaaaatcagagaattttaatccattcaaaagggtgggttgtctaacactgaaagataatggtcatgtctagatagtaaaattacagtatatttttaacggatgtacatgttactttttgacaagacacaagtagtgaattttatcgtacaaattcctattgggtgattatgatacagagttttatttttgctaaagcaattactaatgtcatggctggatacctgtgcccattagtggctggttctgtgtttttttaggatggttattgatctcttgctgagctgagattcaggttttatgccagatagcttgattaatgggttggtttctataagtggactgaatggggatagaaagcaggggcagcctgctctgccaaccccaaatccgtcaagacgcatagctcattatgaaacagttatcaaggatacatgaaaaattaattgggctcagtttgattctgaaaagaatcggctttctacttggcgggcccccccgccccccttccactctttccagatgttctgcaccagcccctagagaaacagcaaagggagacgtattaatacattgtattgattagatcaagacccctgacagttatttgtagagataccatctggctgctgttcgaattccttcaccaaaaacaggacgtgacatgttattaatctcaactctctaagtatagacagttgccttttctgctaaaccgcattttaccattccgtaggagatggaggaagacctgaagggtgcagaaattaaggttattacacaaattgagccatatggtccaaatatttcagcaagaaaattgccaggcaataaaaattgctcctgccttcctaatggtgtaaattacagtttaaccatggctctaatgatgtccttctgccgcgcttaactactgttacatgaaggacattgttttaaaaatataaaaaacaagtaaatgccagcagcgtgttttacaatctgttagtgtgtcattaagaacactgtcagaattacataaacataatggcaggcaacccagcatacaaaggaactcgtatggaaatagaaagtgtcttgaaaactctcttcattatctctgaaatgtcaagagcactgtcccctctggaagttttctagggagaaaagacctgtccatctagtgctttattctaattctcatgtgtgtcccaacagcagtgttttctaaatcaagtgtcacaacccatagtgagactaagtacacatctggtaccacaaccctgtccatatacaaaaaatgaagcagacaaggtgaggagacagctaatgaattctaaacaaaatgatagacgttgaccttttgaagtatttttgtttttggggaaaacagttaagactccactatcttccttgatgatgacatcaacaattaaaagtataatttctatcctcagcaaactaacctggcaacagaaaaccaaataccacatgttctcacttgtaagtgggagctgaacaatgagaacacatggacacagggaggggaacaacccacactggggcctattaggggggtgaggggaggaagagcatcaggataagtagctaatgcatgtggggcttaatacctaggtgatgggttaataggtgcagcaaaccaccatggcacacgtttacctatgtaacaaacctgcacatcctgcacgtgtatcccggaactttaaattaaattttaaaagtataatttctgtcatccctatttggggcatgatattaagaggaagcttacttaagataatcaaaaatctttgggaattacaataaagaccattaatatttgagtaagacttgaacccttcaaatatttttagacctattacaccaaaaacacctcggcacttaaaaattccatataggtcatattgatgttttattctctaaaactgcacaatcctccaagctttttggtcttctaagatgttataaacacagtttgttaaaggaaaagtccagataaacgtttgtagaaaaatttgaagggaaaactacttttaattcccagaggagagttgccttatctttaagccctttttccttctccatttccccaaagggagaaagaccaggatataaattgccctttaaactaaaaaagaaaaaagagagggaaaaaacctaggaaaccaaaaaattattctttttgcatgcatgcattaatattaatgagaacccattaagttattatttcctcatggcacaaatggcaaggctagcaatctattgactagagcatcttctgcctggaaagctcttacccaggtgtccccatggttggctcccacactttcttctggtcttaagtgaaaagttactaccactaaagccttacctggcctactcagctacaatttcactccactctccctcacacacactttctattcctcttctgtctttatttttctctttaatatttagcttttatttctggtttcttgctaacctgtaatcatatttcagaaattgtttttcaaatgctttgttatgcttcttatttcacctaaaaggaaatctgtatgttcacagctaaatcaaactgagaaagcatcatttatatgttccaatttcaatttataagctgacaacttccacataaaacatattatgggcactttacacatgccatcttatttcacctcaataaccaatctgtggagtattattacctaaatttattaatgaggaaatggaaactcagagaggttaagtagcatacccaaggtcacacagctagctgcagagtttggatttgattgcagctctctcagcttctaaagccttttctttctgttatccagtattgcttcttgagtttcagcctagtggaacaagatgttatttatgaaaagctaaacatcaatgaaagccacaaattatagttcaataggacaaagagatgacacagagcttgatatgattcattgcctagtataaatatagaaaacaattgataaaagtttcaaagaattaaaagatcacttggactggaaaagttcagagaaggcttttgggagaggtctgtgctttgaacaatgggtgaaattcaaatagaagaaaagtagaacagatattaccttattcaggcaaagaaacagaagcctggttttgaaacatctgatggcaagtctctgcttcaggaggtcacatggggaatatttttccaatatgcccccattaattgggctgatattaaaacaactgatttaaaaaaaaaatcaaaatactcccaagagatgcctagcaaagctattgagtgaggtggttagcagcatgggtctggggtcaggaaacatagattagagactggctttggcttttttactcattgtatgccttcaggaggttatgcctaatagtgcctcccgcagagaggcagcacctcttagagtcgcaggaactgagacggcactcagtaaatagtggtgagtaagattcaaaataggttttcagagaagaaatcagcacatgaagatatcatggtgtcatagtgtgttgacagggtcctgtctggagatactagtccagaatttcaaaaaaaggaaaagttttcttctggccgggcgctgtggctcatgcctgtaatcccagcactttgggaagccgaggtgggcagatcacctgaggtcgggagtttgagatcagcctggccaacatggcaaaaccccatctctactaaaaatacacaaattagccgggcatggtggtgggcacctgtaatcccagcaacttgggaggctgaggcagggagaattgcttgaacccaggaggtggaggttgcagtgagccgagatctgccactgcactccagcctgggtgacagagcaagactccaaaaaaaaataaaagaaagaacaaaagaaaagaaagacaggaaggaaggaaggaaaatttattatattttcttgtttcccctgcattccctaatacccctttcccaaaagtatggatttcttcactaaatatgttagtagcagaatggtcttgtggcagttgacccaagactccaggtagagcagtggggaaagaaaagacaaggccagccaagaggccagccaagaggacaagctcctccaaaggttgacttgagatattaaactcattgaaaaagttactcaacatccacagtgttctggtggtacctcacttagtcctggacaatgaatcacagcccaagcttcatcattgaattggtgacactgccgagggccaactcaccagccttcaaaaacgacagtgctgctgacagcaaaggcgatgaggacacacatgtgcatccacccttgagatgctaaaagaggcaggaaagaacttgagggaaagaacaaatcactcttctgagattgtcctataaactttataccaggacctatgctatcatcctccttacctaatcatgtttaatatctgatttataagaatctaaatgtgtacctaaaagtagctttctaaatattactgggccacattaaactgtgaccaattttcttccttcctggcctaccacattttagaaatatgatagcatatttgggttgggagtcgctaaaggcctcaagagagtccatctctttgtcctttctgactaggaagacctggtcatcacgccacaagccttggtgtctcgtttttaacagagcaataattatttattagtggaatatatgcttattatatccagaaattaaagttgttaggggacatttgtgtatccaggtccctgtggctgggtgatcgcatctgttagaaataaatcactttaagaaaattatattagccccacagacagtcaagaatggagcaaagggagggaagtgtgaatagggtgaggaagcttgattttaaatcttgtgaaatagagtgtggtcaatatgttgtcagcacattacagtgtgcagacatcaactccatttttcccctctttgaacctcaggtggccaattaacagtatatgctatttattcattacaaaacaggcaggacaaattgaatggttagaatgactaataagaattcttagcaaggagtaaaataaaaaatgatacataaggagagaccccccagaaaaactttagggatttccagaaaaaaaagtcttgaggagttttcctgttaaatgtatctagaatttctactgacatgaggaaattaaaatggaaagattctctttgaatacattttcttcctaaaatatgttctcttcaattccctcatttgtatttccttagagtttcattccttcctaaagcagaaagacagttttaaattacttctagcaattataagtatcattagggtgttttgatgctgcatttttacaacaagcactgtgcttgccttccttatttgtctctcagttcaactccaagtcgcaacacaggaaatgaaaaccttgtaaattgacttgatcttatgaatactcacttttgcaaatatgaaagaacttaagaagggattataaaatactccttatctatataattaaaattcagttgaaatatatgaattcaatattttaattcatgcatttcattttgcgggcattcaaagattatatgcttctatatgtctgccattgatttctgtaaataacattatctctcttattgcaaaacgtacatcagaagaagttggaagaaagcgagggcttgagggatgttaaactgaagcagcagtgacttactatgcagtgttagtagattgcttgccttgaggatctagaagccgatagaagaaatggagccagcaaataagaaatttcttatttcttattccagaaataagaaattctgaacttttaccttcaaagatccaaaaagaacatgctaatgttcttttttttctaacttttgagtaatttagtcattctcgttcagaaaattaagggtctacatctggcagcaactgaaataaatggctcaattgagtacacacttgaatgtcaaatatatcactttaaaagtcaatatttgtttcagctgtaaatgtttctgaacggaaatgatgcttttagtgtctgtagtctaaggagtagttttatttttgaaccctcaaattgagtgctccacctagagccgtaggaccctttcctttccatgaggagagcgccctctactgggtatgtttacttaccacgcatgactgttaagaccctgagctaaacgtatgagcagttgagatgtacataagaaagagtttttggaaaatctttgcccctgcttgtactagaatgattgcaagtgtggaagtagccatagttcactgtagttttctttttactgctgtattattgcaccctgttgggggatacatctgagcatttcatgtgtcctacttttaaaatgcccagatggtggctacgtgctttggtttgaattgggcagccctcatctttcatgctctgtagtctgcctcgttatcagagagacatgagacaaggaaaattcttccatttttcagctcctcttcatctgtttctagtcacccacagtgaatgatgcacttgcacaattgttaaaatgacagtcactgtgataactgaacatcacttccctgggatggggagttccctatgtacccatagcttcttgattccttcccaatacagcacctttttcagtgtaactgatcacttgcaatcttgtaagtaacacagcagtgagaggcagtgtaaatattttataccttgccccaatcacttgtatgtgcatcggtcttcttcactctagcctttaagcttaacagagattttaaatcaaatcattcaaccctagaaatagtcaaaagaattaataaaataaatgaaacagtgtaactggttaaaatagccccagtgcacaatacaggtttagtatgattttgtgacatacacattttatagggcttttgtctccaactacattcttcaaagagccatctgggcaatgaccataggtatcatttttaccaataatagtcagcacttcccactgggaaattagtcaagggaatgagtttttttttttttttttttttttttacaaattatcttcaagcatctatcttccaaaaagtattactggactttgtccattacaaggcaacaacctaagtgagttacttgtgctcttattttagaactttattcatcagatcattgtgatcaaactcaatttcattttcaaagaggaaaaagattttgctctgtttttcttcttaataataggtttgctgaaggaagaacattaatacaggtcagcgatctccaaactttttagaatattcacttgtagaaataataatttggggagcacacatctgcataatatgtatatttacttatttgtaaattataaaatatgtactagttaaatagtatcatttacactatagaaatagacatttttaaaggagtggaaatagataaaattatcaagaaaatattttattatgagcaactactatcaataatacctcaaggcacaatacacactgaaagattaatcattaatgatgctgaatgtcaatctctttcctgagtgttcttgatcatttcaaaattttgttgacacttctgatcaaatacaattggaccattcatgtttatacctcatgctgtggttgataaggagcttgaaggaaggagaatcagactggccatttatttgttcttcatttatgtttgtattgttagtgttatatttgaatcataaatttgaattctaggaattttgaaagccattcatgtttccaaagttagtatacttaaaaccagataatataatccataaacccccttagcatagaaccataaactacaatatgtcacttgacacaaggggtccagaaccccggggacgcagaccagtactggtctgtggcctgttgggaaccaagccacacagcaggaggtaagtggagggtgagcctcaccacctgagctccacctcttgctgtgctccacctgaggagtggagcacagatctgctccacagatcagctgtggcaattgcttctcacatagcaaaccctattatgaactgcgcacgcaagggatctaagttgtgtgctccttatgagaatctaactaatacctgatgatctgaggtggaacagtttcatcctaaaaccatccccacctcccccttccatggaaaaattgtcttccatgaaacggatccctggtgcccaaaaggttggggatcactgctttgcactaaaagcaaacaaatagatgaatattgttagctcctcgctgtaaaactcccattcttccttttccaaggacagatacagaacttaattgattcattcattcactcatccagtcagtatgtgtatgcatctaatatatgccaactgggtatatgacagtgaataaaccagacaaaaatgcttccctcttgaagctcttactctagtggggagataaagacaataaacaagataaggaaataaaatatatacataccatacataagctaagggcaatggaggaaaataaagcagattccagagtctccattataaaaaatacaacttttgcaaattggtctttagttcttattgagtttaaaaggatgtttcccttccacatccttcttcccactgtcttctgggatttttgcttcagatatgatggtcaaattgcttattataaattcccttctaagattctatgagttttaaatttgttttaattgttcacatgttgcattgaatgatgcaattgtactcttctagcacacagagctagtaaatttcctatatattgatatttaaagcctgtccttttatggagtattttgtgaccacctaaacccatgatgatttcttgtgtatacaccttcagtgcttggttcccatgtatttctctagtggtttcagaaaggtgagttttacattcctaatggattacagttcctaaaatccagtatgttcatactttctacttttattcctttccatttagtgcctagaaccatgccagaaaaagacataatttgactgtggatttaaccctcagatcacaaaccaatctcagagctttatttttttgctgagagttttaaataaactataaagtcaaatttaaacaattatcctttggaatcaacagaaccccacatttccttagctttccttagctgttcctattcccaaggatcacattcagagcactcttcttgagtgacagtgatgtgccaggtacttcacagaggtcatctgttttaattgtcacaaaagcccaagagaaagatactaactgttagaaatctagctcagaaaaagtagatgatttacctaaggtacatctagtgtgagtgacaatcagaacttaaactcaattcttctaagttgactgctgttttgattaaagcgcctgggctctcagaagtggactcttcctgggtgttagtcacaagggcttctcagaatttttctcctacatatgagacagcagatcatttctgcctctctgctaagataagccaagcaaaataatagattgtagaacaattaataatgcattcaaaatgccaaactcagcacactttctatcctttgtgaaaaattttgttcccattttgtccaaatgtctaataaaaatgattgtggaaaaataaaaacaatctttgatctgcctaaatgaaaataagaaccacaacttctagctctcagaacaaatcaaagttgtttttatttttaattaagtatgctaagcttaagtacattttctcttaaggtgtaattactaaaccatgatgatttctttttgtttattcatttaaaacacaaataaaagcagataatcaatagatcataatctaaaactagaggatttacaagttaataagcttgagtcaatagatattccataacaaagctttcaatgctgaacctgacataatttgctttgcactaagctggttgacttaatgctttaatttaattccaatattaactgaaaaatccaaagaaaaggggaaaatttaaatcctattatactgaaatatgttcaaagcaacaactcaatatcctgccacaactgcttaagtgtgccaccaaatgtctgcttaatcacctggtttctgattggtgataaccagttaacccgtttggagcctggtacaagtgaattgtggaagtttctcagtggtccattcatgcaatagcttttatcttagcctcaacagtcatcatattttcatctcataatgtctacttttcctgacttatggccaaattattggagttgtttttatttgaaaagcaatttctccttgtctcttgagattaccatccagcctgacctcccaaaaagcagaacagtaggcaggcctaggtcaaagaacagaagaaagcctttcttagttccctgaaaggaagatgtaagaagctatctgtatgaagaaatagcattagatggcatccatcatgcaaagtctggtagtactagtagaggtagtgagagggatgtgaggcaatatccagcataccttcaaggttatgagcacagactcaaaagacaggatccccccaggcaaatcctggttcttccccttacaattatatgaccatggacaatgtgcttcgactctcttttcatccatttccttatctgaaaaatgagggtcataatagtgtctatctcataaggttgttttaaggcttacacaatttaatatacataaagtacttgaaaagcactcattgttatcatcctttgagatactcttgaggcataaggaacttatgctaagaataattttgagaacagcagcatcagtcactgaatatagtagtcagatgtgtctttcagaagagttatgtgtgcacggccaaagtcctaaatattccatttgttaccatccttaaaatatcatttgtgaatttgtaactggtttttgctttgtgtcattgctggtcgactgcagtcagggtggcagtgttttggctgccccctaccatctttagttttctggtcccattagtgttgtgaccaagaacaagttagtgccctttgctcaagtaaatgggctagaagttaagcactgaccttttaccataggggacccttttctattctgaaagagaacttagaaaacagaacagaaatctcattgatttttacaatgcacattttttcatatttctccgtctctgaaattgcatgcatctaacaatcttataatcactgtagatggcagttgttacatacttgtcatttcctgtgcctgcacaaactctcgtcacttcacttgagttctgtgcaccgttggtacgacacacacattgagtttaattgccacttaaaatggcttcaaaaaatcatactatgatttggcattaaaataaaaagtatacacaaaaggcacagaaacagtcacttcatataaaacttaaaaagaaaaaacaaactatgcccatgcaagtctaaagaagtctttcaataagtataaaatacacatctaagtgataaaggaatcactgtgttcttgttgaattagcagcatatttttctctttcttagggatacataaaatagtttttaaaaaaataacagtgtgtttaaatagatgaaatcctggaccccaaaaataggtgtgttttataataaatatttttaaaacagctagcatattgccaataagataatgtatttaaataaaagataatttattcattccgcagacatctatagagcacccatatggtgccaaacatattttgtatccctagtccctgtcctctaagagttcaaggtctagtggggagaaaaggcaggtaaatagatcaatctaatataaaaatgccataaacagcagaaagaacagagaagagagacaagtaactcagtctggggagtcaagacactcttccaaatggagatgacattaaatttgtattttcaaggatggaaatacatcctttccaggcatagaagggcattctaagaaaagaggaaatcatgaacaaaagcgcagcctcattgaagagtgtgttgtaactgggtctgagtcatgagtctagggacagggtgtgaatgaaagaggcagaccagggagaggctaaggatgtgcccaaagagacaggctgcaggagattttgctggtaagggctggcaatcaaaaccaccctgcttcctaaccaggtctaggctctggcatcactctgacttttaaattaggaaagttagagcttgattcttgcacttgactctgtcaatgcattaggatctaggagagatggtaagtgatgttggaaagcagtccaaagttcataagcagttagctatttccatccaaggatgccatgatttcctctcctgaaactaagtgaacagccatgggtaaaaatgaactgaaggcagaacatgggcctctcatgtaaaagcagaagtaggggattcccaggcaagatggccaaatagaaacagctccagtctgcagctcccagtgagaccaacacagaaggtgggtgatttctgcatttccaactgagatacccggttcatcccactgggactggttggacagtgggtgcagcccatggaaggcgcagaagcagggtggggcgtcgcctcacccgggaagtgcaaggggtcggggaactccctcccctagccaaaggaagccttgagggactgtgccatgaacgactgtgctatctggcccagatactacacttttcctacagtcgtcacaacccacagaccaggagattccctcaggtgcctacaccaccagggccctgggtttcaagcacaaaaccaggcagctgtttgggcagacactgaggtagctgcaggagtttttttttccataccccagtggcacctggaaccccagcaagacagaactgtccactcccctgaaaagggggctgaagccagggagccgtgtggtcttgctcagtggatcccacccccatggagcccagcaagctaagacctactggcttgacattcttgctgccagtacagcagtctgaagtcaacctaggatgcttgaccttggttcggggagggatgtccaccattatggaggcttgagtaggtggttttcccctcacagtgtgaacaaagccaccaggaagtttggactgggcagatcccaccacagcaccgcaaagccgctgtagccagactgcctctctagatttctcctctctaggcagggcatctctgaaagaaaggcagcagccccagtcaggaacttagagaaaaactcccatctccctgggacagagcacctgagggaagggctggctgtgggtgcaacttcagcagacttaaacgttcctgcctgctggctctgaagagagcagcagatttcctagcacagcacttgagctccgctaagggacagactgcctcctcaagtgcgtccctgacccctgtgtcttctgaaagggagacccatcccagaaggagttcatagacatctcatacaggagagctccagctggcatccggcaggtgcccctctgggacaaagcttccagaggaaggagcaggcagcagtctttgatgttctgcagcctccactggtgatacccaggcaaacagggtctggagtggacctccagcaaactccagcagacctgcagaaaagcgccctgactgttaaaaggaaaactaacaaacagaaagcaatagcatcaacatcaacacaaaggaagacaatgaaacaaccccatccgaaggtcaccaatatcaaagataaaggtagataaatccatgaagatgagagtaaaccagcgcaaaaaggctgaaaattccaaaaactggaatgccttatctccaaaggatcacaactcctcgccagcaagggaacaaaactggacggagaatgacttcgacaaactgacagaaataggcttcagaagcaaggtaataacaaactcctccgagcaaaaggagcatgttctaacccaatgcaaggaagctaagaaccttgaaaaaaaaggttacaggaactgctaactagaataaccagtttagagaagaacataaatgatggagcagaaaaacacagcactagaactttgtgaagcatacacaagtatcaatagccaaatcaatcaagcagaagaaaggatatcagagattgaagatcaacttaatggaccagtgcaagaagattagagaaaaaagaatgaaaaggaacaaacaaaggctccaagaaatatggggctatgtgaaaagatcaaacctacatttaattggtgtacctgaaaatggcaaggagaatggaaccaagttggaaaacacacttcaggatattatcaaggagaacttccccaatctagcaagacaggccaacattcaaagtcaggaaatacagagaacactacaaagatactcctcaagaagagcaaccccaagacacgtaatcatcagattcaccaaagttgaaatgatgaaaaaaatgttaagggcagccagagacaaaggtcgggttacctacaaagggaagcccatcagactaacagtggatctgtctgcagaaaacctacaaaccagaagagagtgggggccaatattcaacattcttaacgcaaagaattttcaacccagaatttcatatccagccaaactaagcttcaaaagtgaaggagaaatgaaatattttacagataagcaaatgctgagagattttgtcacaccaccaggcctgcattacaagagcttctgaaggaagcactgagtatggaaaggaaaaacttctaccagccactgcagaaacataccaaaatgtaaagacgatcaacactatcaagaaactgtatcaactagtgggtaaaataaccagctagcatcataatgacagaatcaaattcacacataacaatattaaccttaaatgtaaatgggctaaatgccccaataaaagacacagactggcaaattggataaagagacaagacccatcagtgtgctgtattcaggagaccaacctcacgtgcaaagacacacataggctcaaaacgaagggatggaggaatatttaccaagcaaatggaaagcaaaaaaagcaggggttgcaatcctagtctttgataaaacagactttaaaccaacaaagatcaaaaaagacatagaagggaattacatagtggtaaagggatcaatggaacaagaagagctaactatcctaaatctatatgcacccaatacaggagcacccagattcataaagcaagttcttagagacctgcaaagagacttaaactcccacagaataatagtgagagactttaacaccccactgtcaatattagacagatcaacgagacagaaaattaacatggatattcaggacttgaactcagctctagcagatctaatagacatctaacagacctaatagacatctacagaattctccaccccaaatcaacagaatatactttcttctcagcaccacatcacacttattctaaaactgaccacataattggaagtaaaacactcctcagcaaatgcaaaagaatggaaatcataacagtctctcagaacacagtgcaatcaaattagaactcaggcttaagaaactcactcaaaaccacacaactacatggaaattgaacaacctgctcctgaatgactactgggtgtagaatgaaattaaagcaaaaatacatacgttcattgaaaccaatgagaacaaagatacaacataccagaatctctgggacacagctaaagcagtgtttagagggaaatttatagcaataagtgcccacaagagaaagcaggaaagatctaaaatcaacaccctaacatcacaattaaaagaactagagaagcaagagcaaacaagttcaaaagctaccagaagacaagaaataattaagacgagagcagaactgaagaagatagagacatgaaaaacccttcaaaaaatcgataaatccaggagctggatttttgaaaagattaacaaaataaatagactgctagctagactaataaagaagaaaagagagaagaatcaaatagacacagtgaataatgacaaagggaatatcgctactgatcccacagaaatacaaactaccatcagaggatactataaacacctttacataaataaactagaaaatctagaagaaatggataaattcctggacacatacaccctcccaagactaaaccaggaagaagttgaatctctgaatagaccaataacaagttctgaaattgaggcagtaattaatagactaccaaccaaaaaaagcccaggaccagaaggattcacagccgaattctaccagaggtacaaagaggagctggtacaatttcttctaaaactgttccaaacaatagaaaaagaagaactcctccctaactcattttataaggccagcatcatcctgataccaaaacctggcagagacacgacaaaaaaagaaaatttcacaccaatatccatgatgaacattgatacagatattctcaataaaatactggcaaatcaaatccagcaacacattataaagcttatccaccacgatcgggtcagcttcatccctgggatgcaaggctggttcaatatacctaagtcaataaacataatctatcacaaaaacagaaacaatgacaaaaaccacatgattatctcaatagatgcagaaaaggccttcaataaaattcagcaccccttcatgctaaaaccactcaataaattaggcattgatggaatgtatctcaaaataataagagctatttatgacaaacccacagccaatatcatactgaatgggcaaaagctggaagcattcccttggaaaaccagcacaggacaaggatgccctctctcaccatttctattcaacatggcattgaaacttctggccagggcaatcaggcaagataaagaaataaagcatattcaaataggaagagaggaagtcaaattatctctgtttgcagatgacatgattgtacatttagaaaaccccatcatcttagcccaaaaatgccttaagctgataagcaaattctcaggatacaaaatcaatgtgcaaaaatcacaagcattcctatacaccaataatagaaagagagccaaatcatgagtgaacttccattcacaattgctacaaagaaaacaaaatacctaggaatacaacttacaagggttgtgaaggacctccccaaggagaactacaaaccactgcacaaggaagttaagagaggacacaaacaaatggaaaaatattccatgctcatggataggaagaatcaatatcctgaaaatggccatactgcccaaagtaatttatagattcaatgctaccccatcaagctaccattgactttcttcatgaaattagtaaaaattactttaaatttcatatggaaccaaaaaagagcccatataaccaagacaatcttaagcaaaaagaacaaagctggaggcatcatgctacctaacttcaaactatactacaaggctacagtaaccaaaacagcatagcactggtaccaaaacagatatatagaccaatgaaacagaacagaggcctcagaagtaacaacatacatctacaaccatctgatctttgacaaacctgacaaaaacaagcaatggggaaaggattccctatttaataaacagtgttgggaaaactggctacctatatgcagaaaactgaaactggacccctttcttagaccttatacaaaaattaagatggattaaagatttaaacataagacctaaaaccataaaaaccctagaagaaaacctaggcaataccattcaggacataggcatgggcaaagaccttatgactaaaacaccaaaagcaatggcaacaaaagctaatattgacaaatgggatctgattaaactaaagagcttctgcacagcaaaagaaactatcatcagagtgaaaaggcaatctacagaatgggagaaaatttttgcaacctatccatctgacaaagggctaatatccagaatctacaaggaacttaaacaaatttacaagaaaaaaacaaataacctcatcaaaaagtgggcaaaggatatgaacagacacttttcaaaagaagacatttatgcagccaacaaacatatgaaaaaagcctcatatcactggtaattagagaaatgcaaatcaaaaccacaatgagataccatctcacaccacttggaatggtgataattaaaaagtcaagaaacaacagatgctggagaggatgtgaagaaattggaacacttttacactgttggtgggagtgtaaattagtttaaccattgtggaagacagtgtggtgattcctcaaggatctagacccagaaataccatttgacccagcaatcccattactgggtatatacccaaggcattataaatcattctagtataaagacacatgcacatatttattgtggcactattcacaatatccaagacttggaaccaacccaaatgcccatcaatgatagactggataaagaaaatatggtacatatacaccatggaatactatgcagccataaaaaagaatgagttcatgtcctctgcagggacatggatgaagctggaaaccatcattctcagcaaactaacacagaaacagaaaaccaaacaccacatgttctcactcataagtgggagttgaacaatgagaacatatgggcacagggaggggaacatcacacactggggcctgtcaggggctggggagaaagaggaggggtaacattaggagaaatacctaatgtagatgacgggctgatgggtgcagcaaaccagcatggcacatgtatacctatgtaacaaacctgcatgttctgcacatgtatcccagaacttaaagtgtaattaaaaaataaataaataaaagcctgggtgtggtggatcatgcctgtaatcccagcactttgggagtccgaagtgggcagatcacctgaggttgggagttcaagaccagcctgaccaacatggagaaacgccatctctactaaaaatacaaaattagctgggtgtaatggcacatgcctgtaatcccagatactcgggaggctgaggcaggagaattgcttgaacccgggaggcggagattgcagtgagccgagatcgtgccattgcactccagccaggtcaacaagaacgaaactccatctcaacaaaaaaaatataaataaaaaattttttaaaagcagaagtaggattacagaaagcagagaagcccaaaagatttgaatgttcactgacaaacacagcaataaagtatttgatattgcaggcttcatttgaagtaaagcttcaggaatacctggaaaccaagctacaggtggcactcagctccctaaccagcctttgccaagaggaggggtctttccagagacaaccatagagagtaatctttagccatgttatcgtctaatatcaaaaatagggggcaggccaggtgaggtgactcacacctgtaatcctaacactgtgggaggccgaggcaggcagatctcttgagcttaggagttcaagaccagcctgggcaacatggtaaaactacatctctacaaaaaatacaaaaaaaaaaattagctgggcctggtggcacatgcctgtagtcccagctacttgtgggactgaggtgggagaattgcttgagcccaggaggtcaaggctgcagtgaacagagatcatgccactgcaccccagcctgagtgtcaaagtaagaccctgtctcaaaaaacaaacaaacaaaaaaaaaagagggtgtaatggaagtgttttaatatgaccacggcatcctctcactgagatctgctaccatttattttattttgtttgtttagagacaggtctcactatgtcacccaggctggagtgcagtggctccatcatagctcactgtatccttgacctgggctcaagtgatcctcccaccttggcctcccaaaatgctggttagaggcgtgagccaccatgcccccatttgtaatttaagctgataaatgagagcaggggcacaagtctgtatccgctaactcttcagcaacagctgacccaaggccagcaaacccattgcatagccaacaaccaaccagatcctgtctttctgaagacacacagagacagtagtcagatggttatgactaataaggctgtaaggttgtttagactgacaattggtagccatgctgggcaaaagggaaagaaagaaaattaagagaaagggaaaagagagagaagtgccatgcagcccctgagtgacagagagagaaactcagttctgacagttttccagtttcaaaacccaaacctgtaaagttgacccttgaacaacacaggtttgaacaggtccacttacccatagcttttcttctgcctctgccactcctaagacagcaagagcaattcctcctcttccttctcctccttgacctattcaacaagaaaatggcaaggatgaagacctttatgacctttctcttccttatgattttcttaataactttttctctagcttgctttattgtaagaatgcagtatataatacatataacaaacaaaatatgtgtttgttgacagcttatgttgttggtaaggcttctgttattagtatcctgttagtagttaagttccgggggagtcaaaagctatgtgtaggccaggcacagtgggtcatgcctgtaatcccagcactttgggaggatgagacaggcggatcacctgtggtcagaagttcaagaccagcctggccaacatggggaaaccctgtctctaaaaaaaaaatacaaaaatttgggtgtggtggcacacacctgtaattccagctactaggaggctgaggcaggagaatcccttgaacccaggaggcagaggttgcagtggccaagatcgttccactgtactccagcctgggcaatagagagactctgtctcaaaaaacaaacaaacaaacaaacaaacaaaaacagaaagttatgtgatatgtagacgtttgcctgtgtaggacattggatcccctaacccttgcattgctcagaggtcagctgtagcttctgtacaggcttgggttctatacttgccttttctcttccttacaaaaccaatcaaaatgagtttcttttccctgtaactaaatttccttgactagaatattgattactgccaattcccacctttcctgtaagttgtaagttttagaatctggttgtttttttttattgggaaatacaattgatttttgtatgatcctaaaattgctgaactctataattgtttatttttagattctgtggaccttttaggtagttaataatcatatctcatgcttcaaaacccatgtaccttgtgttagaataagataggataggataggctctggtaacaaataaaattccaaatctcactacctaatgcaataaaagtgggaaagtcaaaggtggatttggctgcccttctccatcttatatcagtgtcagatcatgataggggaagagcatgctgcagagttctgcaagaagcttttaaggtccagacctggaaatagctgacattccttcttctcacatcccattgataagaatgtctcataacctctctatttaggggcagggaaactagcaactgcgaaaaaagtaaaataaatgaatatttggtaaattataataatctctgctgcatagctctttttatttccttatcttacattgcctaggattaccactacaataataaatagaatgcatctgtcttatttgttatattaacaggaagactgctaaagttttatcattaagtatgattttgctatatgagtgctgaatttttctcttgagatgattaaatgtaaaacaacttttctaagggctaaatcctatatggtcattgctctggactgaatgcagttgcccactccctttccaaatccttacaatgaaatcctaaccctcaatgtgatgttattaggaagtggtaaggggacaaacaagtgaagagacagatacactagagtataagatctatcaagtaataaaggtggacctgtgagtaaattcaaaccatttttctctcttgagtagccatgcttatgacaaagaaattttgaatgccttgtgggttgtttgtttgtttgttttgagatggagtctctctctgtcacccaggctggagtgcagtggcgtgatctcggctaaccgtaagctccgcctcccgggttcacgccattctcctgcctcagcctcccgagtagctgggactacaggtgcccgcaaccacgcccgtctaatttttggtatttttagtagaaacggggtttcacagtgttagccgggatggtcttgatctcctgacctcctgatctacccgccttggcctcccaaagtgctgggattacaggtgtgagccaccacgcctggcaagaaattttgaatgtcttgttttcaacaaatagttttaatttaaatcgaaaagagtgtgtaggtatgagttgcgaatttgtaattcatttgcgattctggtattgatggattgtcttatcttgtacaggtcatttgggccctatggactttaggctcaacaacaaaatcagacagttggagtacagtgccagtcacaatttttagactgtttaaccctaaatgtctttctaataggccttatttatatgagaacattttatagttaaccacaaatattttgtctgtgtttatcaagagttacaagcatagcagccctttctttactgaataaaagttcaaacaaattggattcatctttatttggagctgccaattaaagtgggatatagtatagttaagcagtactcaacatgtaggccactaatctcttagggtcccaaacactctttcaggggctctgccagggaaaaactatgttcatactaacagtaagaacttacatgtctttttcaccttcatccccttcatgagggtacactacagtggagttttccagaggctccatgatgtatgaggatgtagtcactctgctggctagtcgtatacatgtctcagtattcttttcctttaaacacttctctactttaattttcaatatggtactattgatcgatataaagatcagaaacaaaagttctttgggatcttcagttgtttttaagaaacaggggtcttgaaatgaaaacactggaactactaatacacttcacaagtacattttacctccacatagcacagaaataaaatcataaccctgtctcttgtcagcagtatgactctaggtaagacatttaacttatctaagcctcaatttccttatgtataacaatacaaatctcctagcttcatgtgaagatgaaatgggatacaccaagtctgacatagtaggagcaaaaactttgctcacaaataatctaccttaggaaggatagacaagaaaatggtaaactggttgggtgcagtggctcatacctgtaatcccaacaatttgggaggccaaggcaggtggattgcttcagcccaggagttcaagaccagcctgggcaacttagtgagaccttgtatccacaaaaaaaaatacatatgtgtgtgtgtgtatatatatatatatatacacatacacacacacacacacacatatatatatatatatacacacacaaaaattagctgggcatggtggcacacacctgtggtgactcaggaggctgaggtgggaggattgtttgagtcttggagacagaggttgccatgagccaagatcatgccacaatactccaacccgggcaacagagtgagactctgtctcaaaaaaaaattaaaaacgaaaagaaaatggtaaataaataacttttgttaccataagggaggagaactaaacaactggggcatgggggaggagatggggaacttttcattgttgctgcacccttcacttagaaggtccagtttatgaaaagtaataatttagttaaaaccttcaaaaatgatttttaaagaatttccctgctcctcatagatatagcctggtagtttacataccacttcattttctatgaagtactgttgttgcaaatttatctatgcaaagagctaagcatgcaatgattgttgctgtgggtataaaatactgctttgctaaggatactgtagctaactcacagttaattggctgaggcctgagcacacccatatcagtttgccatatacagatttttggttaacttgatttccatatgcaaagtgagaagaaagttctaattcatatatatatatatatgtaaaatatctttctctcctgagtcatcaatctctacctcattattgaaaaattgccatcaatataaaaatatactcctggtatctcccattttttaaatatgtgactccacgggcccctccagctaccatctcctgttcctgttcccctttacagtttacagccaaacttctcaaaagaatatattactattccctgtttctacctctacacatctgttctcccttccacccactccaaccaggtttctgtccttatcactccattaaaaggctcatatcaagacgatttgccacgaaatcaagagctcttcctatgcacagcttccttaacatttcagcagcatttgacactgcttaccacacttctttaaaaaataccctcttctctcagtttcaaggagaacacactgtattggttttcttccctttattgtcctggtctcagcttctattactgatttcctttcggctgctgtccaagtcagcctcatcctgcatctgccactgagtttggtcctgagctctctcttctacttgacctacactctctccttagactattcctagactcattcaagtctacttcttagacttcactctacattcgcttcttcaccccagcccttcagcttaaattctgtccatattcactgataatacaaatacttttgaacacttactctagcccagccacaattagaggcatttggggtttagagagaatgaagtagatgcaggcctttgactctgtggagtttacattctggcaaggaaagacagacaacaagcaataatcataaaaaaatatggtatgttagaaggtgatgagtgcttaagaaaataaatcaggataaaaagaatcaaaattgggaggagacagggaggagagtgggtcagttgcagttttaaagaagagtggctcattgagaagatgagctgaagttactcatgcaaacctatgcataaagtgggttgcaggcagagaaaacagccagtacagaggcctcaaggcacgagcttgtttagtatgttttaaaattttcaacaagactagtgtggctgcagtgcagttttcccaggggaaaatgataggagacaatgtcagaaaggaagtggaagggtgggcagaaagaacaggctttgattatgaataacttgaggaactagaacagggttttgagcagaggagtgacatgatctgacttgtgtccaaaatacacttttgctatgtggacaatgaggatttaaggttaaaaataggctaactggctgggcacggtggctcacacctgtaatcccagcactttgggaggccgaggagggcacatcacaaggtcaggagttcgagaccagcctggccaatatgatgaaaccccatctctattaaaaatacataaattagcctggcctgttggtgcttgcctgtagtcccagctactcaggaggatgaggcagaagaatcgcttgaacctgggaggtggaggttgcagtgagccaagaggctgcactccagcctcagtgacagagcgagattccatctaaaaaaagagaaaaaaaggcaaactgaggctactgcagtgctgagagtgggaaagtatggcttggatcagagtggtagtagtagatgtggtgtgaactggtaggattctggatgtatcttgaagttaaataaatccagtcctatttcctaatgagtagagtagatgtgaaaaaaaagagaaaatgaatccaaagtttttggcctaaacaactggaagaatgaagtcgtcatcaactgaaaaaaagggaagactgcaggtgaagcagcttttctaggtacatcagaatcatttcagtcagggagactgaacactatgggttttgagatagaaagtttattattattgttcattagagacagggtcttcttatgttgcccaggctacactcaagcttctgggctcaagcaattcttccaccttagccttccaaatagctgggactgcaggtttgcatcaccacacccagctaaagatgagcgctttctctaggaattagaccttacgcaattgtgggaatagctgggaaagtgaagatttggggaggagagtaagaagatgggtaagggagttgccaccatgcccattcaagaagccaaggatggccagccaccttagtgtccctaccacagatgcctatggagaggtctatggaaagcaactcctctgtttagctaccatctctgtggggccagcactaagtgtcaggtggtagacctgggccactattggttaaagagtcagcagctggaaagaagagtcagattggagtagaggagaatgaggacaatctggaacccacttgcacctctgtgtctattcatcttcacatctaacttcaaccaacttcgaagagtaatggccactgatttactttcattctccaaattgtatgtaaatgtatctttaatccagaactagatagagaagatatattactgctatatataacaaagtacaacaaacttagtagcttaaaaacaatttctacttgttatctcacagttcccctttgtcaagagtctcaggccttttgttcgaggtctcataaggctacaattagggtgtctgttgggctgtgttctcatccggaggtttgaatggagaaacatttacttccaatctcattcaagttgttagcagagttcatttctcttgtgtgggaatgagagggaggccctggcttcctgttggctgttggccctcatgtcctagagaccacctagttcccctccacaggggtccttcacaggccctctcatagcatggcagtttacttcttaaagaccagctgaaggatttcactttcagtctgctgagatggtgtctgccatatttatggcagtgacatcctagagttttgccattttctattagttagcaacaaggcataggccctgactgcactcagggggagggagaatcacacaagggcatgattcattgcaggggtcaccttaaggtgtgtctcccacagaaggaattctgagatatgcagtttcaccttaaccaatctgacataatacaaacttcaaaaaagggaaaatcaagagatcatatggagacttgttaagtttcagatgtattagacatccaaatgaagaggttaacaagacaattggatacaagactggattttgggagatatgtccaaggaccctcaaatgtgtattcctaattcagtctcttcccaaaactatagtttcattggtctgtctacttgacatcttgaacttaacaagaccaaagttgttccttcccttcccaaatctgttactgctcagacttctacatctcattaaatggtaccctcacctaccctttctctcaagaagaaaaacctaagagtcgtccttcattcctctctttcccttgccttctacattcaatccatcataattctattggttctacattcaaaatataaatctatccccttaattctatgtctaccattaccaccctagtccaagccactattaccccttcctggccttcagcaaaagcctttgaatgtctcccctccctctcttgacccatgttatgaaatggattgtgttcctcccaaaatgcatacactggagccctaacccccaaggtgactgtatttggagatagggcctctaggaaggtaattaagcttaagtaaggtcataaagatgggaccttcatcctataggattaatgttcttataagaagaagagacaccagagatatctctctgcatgcacacaaagatgacacggaaacacatccagaagacagctgtctataagccagaagagaggcttcaccagaagccaaccatgaagacaccttgatcttagacttctaacctcaagaattgcaagaaaatgaacttctgtgtttaaagcaactcagtccatggttctttgctatagcagcccgagtagacaaatgcaatggcctccatatattgttcacacatcagccagaatgagttcttcaaaacctagattaaattgtgtcacacccttgtttacaggccttcgatagttttccactgaaattggaatcagacttgaactctttaccttggcctccaggattgataccatctagctcctgctcatccttttgaccttctcttgggccattcttctctccatcacccagcttggtcgcactagctcctttctgtcaacaaaaacaccaagtctgttcccatcttagagtttctgttctgctcttgctcccaaaactttgtcccctgattcttcacacagatggtgtttttctgcactcttgcctaaatgtaacttcttcaaggacctttcttacccgcccttgtaatcaagaatttcattcactcttccccaatacctaagcccaaacactaattagtgcaccaccctacttattcccttcataatttaccacaatttccaattctctctctatgtcttgatctctctatctccctctgtttatatattgcccatttgtcctcctttataatgtaaaattcgggaaggtaatgaccttgcctcccttgctttctattgtatcctcagagattaggagcatgcctagtgtataagaagctctcaatacatgtgtgtttaatcaaggcttaaataaatctaaagctatggcccaaatgaaaatttttatatgagttttagtacagttttgccactatttccatagaatagattatcagagtgaaattgctgggtcacagtgtatgcacatttttaattttgatagatcagaagtactgctttttaatatttagtgtgactgatttgccactttaaaatttaattatcacaaatttaatttttttcctcttctcctttgaaaaatgaggcatttcaaaaccatttttcccccaatgtttttatggtaactgaagcatcattgttcattttgcaataactctagcttttgctttataggttaaattgatacagccaatttgtctataaagaaaatgtctgtgaattgagtcttctttttgaattgacccctccattacaaaatgaatgatgtattctaaagagaggaaaaaaaaaaccttctcccttttcacgtatcattcttcttttctgagtgtagagagttgttggagtaaaagcattaaagtgatcccagtgttaatatgtggatcctccaagctgaacattttaagtttgaaatttacaattgttataacaattgtcccctgcctaatccattaggtgacagcattagctagaacccagagctaggaatgctttaacacttatgagtacatttgagttggcctcattgttacccagtcgtcaatagtgtccttaacatttccagctgcctcatcactgtttgatatgtacaaggggctgggacaagggtgtagagggttccactcaaacatgtccccagtatcaggagaaaacacacttcaggaaggcatggttctgatagtgggtcaggaaagaaaataggaaaattggttttaacaccattcagttattatacttcctgcctcaattgaaatcaaaagaaaaatccttgtgtctaaagaataattacaaattttgaaatagagtgaacgttccataaagaaaattttaaatcttttttctaagaaaatacttttcctattaccttgtgcaaatggcaatctatacttattggctgaataataattgagttaattaattaattcctggcagatttattatttcattagtcactgaccatgatctataccacgatagggtgaaatttaaaagttcttccattattccttcaaattgcattgcagagctcttcacacataattaggtcttaaattttttgcctaatgttacttattgtttcctaacaaatgcagttcaaaaactttagagtgacattcacagccctctttagtcttatcacaatcccctttccagccacaatccctactattcccctgcaaccatcacacttctgctttgttgaactgccacccaggtatctccagaactttctactgttccttcttctaatccttcatctatttttatctgctcaaattctacatctttcctgacctggatcaaatgccacgtctcaattaagtcttccccaagtcctcaccccctttcttctgaataacaagtatttccttagtatttctctggtgcttattatagcactgccacactgaattgtgtgtatgtatatacattattgatttgctctattagattataagttcctcagagtcaagagtctgtgttacccatcttgtatcttccattgcaattttatagagtcttttgcataaaagatgctcaaaaatgtttaaagaagtaaaccagctgctgagaaactgctaaatgtttgcactgagcattttggcagctgtgtcatcccacttggtgatgctgcctagcacatacacactaaaacaataggcctgaacactaaacaataggccatggtcctaaagggtattttgttctacctttcttgtattgtgagttgatctttgattccggagcaactctgcatgtacgtgtttgctgtcaaaataaatgtcttttttgtctcaccagctgagatacatttaggtgaagatggcactggtaaaggaagtgtgcaggtgaagttggtgaaaatgttctgacaatgtttatattttgcaggcttggaagtctcatgccaagtgaaccatggataagtattcaagtttgatatttgcctaatgcgtggtaaaaaaataataataataatttctgtatcaagactgatttgatggccaggctctgtggctcatgcctgtaatcccagcactttgggaggccatggcgggtggatcacctgaagtccgaagttcaagaccaacctggctaagatggtgaaaccccgtctctacttaaaatacaaaaattacctgggcgtggtggcgggtgcctgtaatcccagctactcgggagactgaggcatgagaatcgctcgaacccaggaggcggaagttgcagtgagctgagattgcgccattgtactccttgcatttcagcctgggcgacgagagtgaaactccatctcaaaaaaaaaaacaacaacaacaaaaaaaaaaaactgatttgaattttgcaaaatagtattagacataaatatgttgatcaacttttggggaacttaaaggttaactttataaatggagaggaaaaatcgtcctgcagaatccacgcctcaaattatctggctttcaaaaatctagaaaaatattttgtgttgatttgtctacattacgacatataaaagtcatccaattgcctggatgtactctatccaaagtcatggcttttagataacagttaatgggagctcgaactgcttctcacattttatttgtaatctaaatcagaaactctaggtctcaggtataatcattccttatcattaagacaaaataaaatataattaatgataaaggatctcggcagttcaacttaagaatacagaggttaatatacttaaatctagattcttctgaagttctctttgcacaaaaaggtgaatttttgatgtgacttattctctggttcttggtattcatcataactaaggaggcaagggaaccccgtgacttggttgggatgcagaagccaaaactcatccatttcaggataaagagcccaggataagggagaatcataaatgaaagacaaagccagaagaaatcccactggcttagaatgaagttgatggtgaccaggaagattaaccctttccaaaatataatatggacacgtaatactctgttgatgaacacaagagtgcctatacatcattgttttggttcattactgggagcagggtaaaaagattcctaaggtctacagtaagtgagcttagtgaaaatacaccccaaagaccagagggaaagctctggaaactgctggatcatcagatcaatagactcaaagatgactaagttgggaagctttatgcagtttaaacatttgtgcagggagtatccccacacagccttttattgacagctacagatcaatggtaatttttgatcattttcaacttacataaacctattgaccccatggccacctttggggcacttcaagtcatcaaaaataatcagaggagatggtgtaaaattgtcagactgctgaagactccaagtagttgcatatgtccccaggagctgagtcgagaggttaaaatatagttcaaattgccagcagaacctcaactgacagagtgttccagagagtcttgtctttatgtctcataaaatgaggcactgatttgtatccaaactctgaccttcatgcatataaagttaaagaaggaaaaaagaggctgaatcccattgaagatattagattgcaaagaatggattattcctagtaaaatatttcttcctgtttttctttgttgagtcatcttcttcatctgctgcctaacaaaagtagctgacatgcttgtagaattacgtacaatatggacgtggacatagaatgaacaaagacaaaacagaagcaagtgcaaggtggcaggccagaagtcagggacaacaaaaaatgtagtcaaaaaaatcattaggaagagtgaaaggaaggaaagagcaaaataatggcaataaaggggaagaagtaagagtattgaattaagataatctctatagaggaaaaggagtgagagaagaaggaaagggtgaataagaagaaagagaaaggaagaaacggaagaaaagtgaagcaaaggagtaaaaggaaggaaaatcgtctttagtgatgacttttcctagttagtaagacagaacgctacatctccaaaggaaggaactgaatccaaaacatctaagatccacagtgctcaagcaaatatcctaaatttaagaaaaataacaagaaacttagtacgtaaatgagagccaacccaattcacagagtgaactgcatccaaattttgcagcaggattctaaaatagtgaactttgatgttggaaattcattcaggagagaataatataaattatttcctaaaacgtcaaagaataaattggcaaggattatcttgtcatttttatgttttcttcattttttaatatagcttttactaaacattgacaaaaaccatggctattgtttagatctatttaaggagtctatatgtggtttgtgtgtgtgtgcgtgtgtgtgtgtgtgtgtgtgtgtgtgtgtgtgtgtgtataaaactattcaggaataacaaagtagccagatgcagcagtggcttgcacctgtaatcccagcacttttgcgcagccaaggcagaagggtgacttgagctctagagttggagaccaacctgggcaacatagtgatacccaatccctacaaaaaaaggaaagaaagaaagaaaagaaacattttgttttaattagccacacacggtggtacatgactgtagtcccggctactccagaagctgaggcaggagaatcacttgagcccaggagttcaaggctgcaccgagccatgatcatgccacactccagcctaggcaaaagagccaaaaaataagaataataataataaattaaataaataaataaataatgtaatatgagaacttgtcctcagtataatttcatgatacagaaattacttttacatcccaacatgtggttatttctctcccttttttttttagatacatgtagaccaggttaagcaaaacaactgttgtaatgaccctttgtaggagtatacccctaaaaattttctgtgccaggcatgcatgaacttcagcttgcaacctacaggccatatttctatattagatggtggaggtttggaagctagggcattttgaatacttctgctttcaaggatctgagccgtaaatgtttattaaacgaatctataatgaaatcagttttgttatttttttaatggttgcctggagtgtgttggatgactgaatgccagttgttaatcattaagtactcatgttaccaaaagtgtttgatagtattgccatctaggggctgaatggaattctcagctctgaaataaattataattgagcaggtgcagctattgacaatatacatatgtttttgctttatagcccacatgcttttcatgtttcttatgacaaaagcttatgaaaaaatgtcccccagcagcccaccttttttatatataatctgttagaggtgattactatttgctttggagcgtatgcttttttggcatctattactgaatattctgaacaaagaattattcttttttgcattattaatcttgcccatgtttgccctatttccacagaaaaggaatcatttatcagaaaagagtgtttgtaatcgggacttgtagcatcttcagatttaatattcattatggtcattctagttctgtgctatatttatctaaaaggccaatccaatgttatggagaaataagtttttaaatatttatgatctaacttttaatattttaaaaaagagaaattagtatttctgtaaaatttgtttcagagtctgattgctcagcaaatgtttaaatattaaaagatttcaagaggttagcgtgtaatatcataatgggacttattgaaataggaaaattgactttacaagtttttgatatgtgaaggaaattgtattttctctgcctatgtttaacacataacaagaaataacacagttaaaatatacagccaataatgtcagaaaacagcaccaaaacctatttctacattgttttgtttttgtctaaccagtttgtttggaaaacaattctgtttgattttgtcatcttgttttagattttatccaaaatgatatttggatgcccccacacataattttttctgatgttcttgggtgcctactttcagaaataactttcactactccactttatattcttcttcccttgttcatcaaggaaagaagacaattgaagaccatgtatcacattcaaacatctaataaaccaaagcagatcattgaatgtaaatatcctactaacccagtcaaaactttctcatgatttcttatatccaatggggatggtacgcaacagaaaatgccagtgtgtgtgtgtgtgtgtgtgtgtgttcgtgtgtgtgtgtttacctatgaacacattactaccccacttgcatacataattcctactttaaaaggacatatcctttcagtccagatgtggaaagagcaccccagggcctttagaaacattaggattcttagctccagtttagttatgccaaatatgttaatgctgctctccaagcagaaaaacaaacaaattttaaaaatcctaattaggctatccctttttttcttttcttttaaagcaacaaagaccaaattctccaagcctagctaacaattacttttggtaggtttcatagttttacttatggtgcttttaacaaatgaaaatatttttatatctatattaataatagacttctctaagggtgtttgtacatgtatagttgaattggcttgttactgttttcttgtgtttatttgttttattgaattcgtaagatatatatacatgccaagagaatgagagagggagactgggaagatggagagtcttgtgtacaaacagatttggaaattaggggtgttcaggttaactctccaaacccttaatattaacctggcaggcaattatcccagtctcagacatgcagcttggcaccactgatttccattttgagctggatgcagcactgatctgaagcatcatgttttgtttttttttttaatgtttatatatcacacgctttgggctgcaagcactgaaaagtcaaggatgctatctggtccactttctgagtgtctgaaatcatacaacattgggtaatatattcacggtgtcaacaagaataagaaaaaatgcgttgttttcttaatgataattcaaaactctgctgtagtgtttgcgctgctgttgcctacaagctttggccatgaggttcagagaatgactttccagcaatattgtcagtttcaaaaaaaaaaaacaacaacttaacctgttaattttcttacagggaacaagccatcaagcccacctgtacgggttagaaccattcacaacatatcgcattggtgttgtggctgcaaaccatgcaggagaaattttaagcccttggactctgattcaaaccttagaatcttccccaagtggactgagaaactttatagtagaacagaaagagaatggccgggcattgctactacagtggtcagaacctatgagaaccaatggtgtgattaaggtaatgtctaccctgcataagaaattatgtttggtgttctccagataaatagatgagccctgacatgccatcaggtcactgtgggaaaactcccttcacagcctgtttaattctccttgatagctcctccaggcacttaatcatagatcacagaaacctagcttagatgtgtgatgcttcctataacccaacactgagctaaatgctctccatggattatctcatttaatcctcacatcaaccctactaggtgggtaccaccaaacctcatgaggcatatgcaggctaagtaactgcccaagcctacactgtaagtaattgagttgggatttgaagccaggaactcacatcagaactgaactctaaatgactgtgttcttactgcctcctgaattaccctacccagttatttgcttaagacttgcctaatttatgcttcaaacagagctcattaagcaagccacaggtgtctgctaacttcccaacttctgtatgtagccgtgagaaacaatgttataaatgttgtatacgtatctcaagctctgccagcccatgagtacagggggactgtattttcatgaatagcctgcattttgatgttttgaaccttcagccacacaaaaaccagccttcatctacctctctgatgttcctccccaaggatggtggcagacatacctgttagttcatactactgcctttacctccagtctctcctggccgtggtccatctcttaggccctcatcaactaccttctgcgggctgggactgcagagtcccccagcctgcagctgctatagacacactacccttttctttgccactccttctccaagaggcagactcccacatcaattccacatcacagggttgagactaagctgttacttttaataaagcctccctgaaaaccctaagagagggatgacagcaggaaattacgtgcagcaataactaagaactgtaactagagctcacagtcccaggtccatcctgtgggctgcctctctgcctagcttcaaggcctgctgcaagtagcagtagcaagctgcttcccaccagcctgcctacatgtggacagaagccagacttctcccccctggggcaagaggcttgagccttaggattcatgaccttaaaatccaaatcacggccccaaggcacccatcagaaaagaaagctccttttccctcaaagcacttctccttgtgggtatttggagtcatgagagcatctgcttcttggtggcataattgacaataagaatattgactccttggacctttatttacatttcaccaaatattaagcaaatatttggtgaaatacttctactaagtgccatatacttattcaagagtgaacaagacagtcaggttccctgatgttacagaccgtgtgtgagtgcacgtgcgtgtgtgtgtgtgtgtgtgtctgtgtgaataaatgtggcagagtatatgaatggtgggggtacagaaaagcaaacaataagctagtaaataaataagcaagggaattactgagagcgatgaatgctataaagaaaattaaatagaataatgtaattatgcctgctcaggctattttagaatggaatatcatttgaatcaagttgacatttgagctgagtcctgaatgacaagacagagttagtcatgtgaggatatgggggcaaaatgttccagacaaaatgaacagcaaatgcaaggcctgaagccaggaatgaacttggtgtattcaaggaaagagaagaaagctagtgtgtatgaagtatttgggagaaagaaagatggcactagaagaggttggagggactggtaggagacagattgtcccaacattgtaggctgtggtaaagtttagaatttgttccaagtgcaatgaaaaattactgaaggctttaagcaaaggaatagcatgatcaaatttacgtttttaaaaatcactctggctaccctgtggaaaatggactatataaggaccaatggagtttgagaactattaaagatttcaaggtagaattgaaggtgggtcaaattagagtagcagttgtgaaatcatgcactataggtgaatcgaagatacattcagaagatagagatgacaaaatgtgttaatgagctgaatgagagacatgaaggaaagggagcgctttgagatgagttttgggtttaggctttgggctattgatgaggaaggggagactggaagatgaacaagttaggagcaagtagatagtgtgaggtacaagtctaaaactcctgagagtgttctttgctgggataaatgttcagaatccgttagcaggtggatgttatataaacccatggtgccagaggagatcagctatggagagaatgtaactcaacctgttgagagtctgggatcaagccctgaggcataaatgtgggggtcaagaggaggaaagagagccagcaaagactgataagagggaactaggctagaaggaaaagtgcatgagtggagtgtccaaaaagagaagagaaaatatgccaaaatgttgctgagagcagaagtaaaatgaaggcagagaagccaccccgagtatagaaatgaggaggtcactgtgatctcgacaaggagagtatgcagtagaatgggaaacctggttggcatggctggttgaggagagaatggcaagggaggaagtaggacatcaactcattaaagccatttagatgaaaagaaaagcagagaaatggagcaataggtggagactgtgggatgggaagttttatttaaaatcattgaaaaatactagagtacatttaaacacgaatagaaataaccagtagagggagataaactggtgacgtaggagataatgagaataacggcagtagtgaagtcttggggaaggaggaagggatgggatacagcgcttaggtggccttcagtaggtacagagatatttcattcatagcaaaaggaggaaaagcaaatcatgtaagtctagattcacatggatacagaggtcagaatatataacatggaggcattcttctctaactgcttctattttcagtgaacgatgtggttatgtcaacaatcaatcaacggtgagggagggaagagggtgttagtggttaggggaaaggaagaaatatgaaataatcacctgggaaaatgacagagcaaaagcatgagggaataaaataggattacaaattggtaatcgcctatttaaaatgtatggatagaagtttaaagtgagaccaataaaaatgtttgggtgtttttctacaaacccatttcagagcttgagtatagagggacagctaaattttacactaattagagatttgccgggtgaatatcaggggcagcaaggggtgcttggggggtcacagaggctgcaagctagttatggaacctatgctcccttcagaagatatggcagtccccttcccacatgggggtggtcttgccctgggtcctcaacaagaaaatcacaccaacatacaacattccaacataaagaggtttccaaacttctaggctgtgtaatcttagggaaaaaatggagtatgttaacaatttagtctaaattaagcttgcccaagaaccacttctgggaatgtttcaagggtgtgccttccaagggctgtaaaatgtgtcctgtcccctcttgagagtcaccatgatagggagtcatcgaaaggagtgtgtcatctctctcaggtttgttggagcaggaaaaggttggaaaatcactgttcaaaaacacctgcattcagattaacttacttcccatctttcaaaaaaaatgaaaacttgctctacatttgtacagtataataagcattcagatgtttttttccagaacaaaagactactttgcccccaaaggagcaatcagttcttccatggcctggaagagaaaacagggtgtttttttccatcccctagtcataaagatttatatacatgtatatatgtacatgtatatatatgtatggatatttgtacttatgtataaaatataggtgtctgtgtgcctaaacacacacacacacaagcatactctttcagccctggcactctgtaacaacaaatgattaagcgttgtaattccatttcccagcaaatgccgtggaaggtagaccctactttagtcagtatgagatcagaagcagttcatatccataaaacaggagactttaatactattctctactttaaaaaaatacaaataggagaaaccttgtgaataccatttaagtcaaagaatctgattcaatagcccttagttttgagataaatgtttatgtagttcccaaactgaaaaaaaagaaaagaaaaaggcaaagaaaaacattgtttgtctctctgtgggccttatgttaactgaaaaaaatcacatatccccaattaatatcagaatacttcttctaaattagggtcatcaaaataaggaacaagggggtgaaggttaaaaaggggctaagtaactacacaaagaaattgtatgctgcaagttatcccttttgcttctgtccttctgtagacatacaacatcttcagtgacgggttcctggagtactctggtttgaatcgtcagtttctcttccgccgcctggatcctttcactctctacacactgaccctggaggcctgcaccagagcaggttgtgcacactcggcgcctcagcctctgtggacagatgaagcccctccagactctcagctggctcctactgtccactctgtgaagtccaccagtgttgagctgagctggtctgagcctgttaacccaaatggaaaaataattcgctatgaagtgattcgcagatgcttcgagggaaaagcttggggaaatcagacaatccaggccgacgagaaaattgttttcacagaatataacactgaaaggaatacatttatgtataatgacacaggtttgcaaccatggacgcagtgtgaatataaaatctacacttggaattcagctgggcatacctgtagctcttggaatgtggtgaggacattgcaagcacctccagaaggtctctctccacctgtgatatcctatgtttctatgaatccccaaaaactgctgatttcctggatcccaccagaacagtctaatggtattatccagtcctataggcttcaaaggaatgaaatgctctatccttttagctttgatcctgtgactttcaattacactgatgaagagcttcttcctttttccacctatagctatgcactccaagcctgcacgagtggaggatgctccaccagcaaacccaccagcatcacaactctggaggctgctccatcagaagtcagccctccagatctttgggccgtcagtgccactcaaatgaatgtatgttggtcaccgcccacagtgcaaaatggaaagattactaaatatttagttagatatgataataaagagtcccttgctggccagggcctgtgcctgctggtttcccacctgcagccttactctcagtataacttctcccttgtagcctgcacgaatggaggttgcacagctagtgtgtcaaaatctgcctggacaatggaggccctgccagagaacatggactctccaacattgcaagtcacaggctcagaatcaatagaaatcacctggaaacctccaagaaacccaaatggccagatcagaagttatgaacttaggagggatggaaccattgtatatacaggcttggaaacacgctatcgtgattttactctcaccccaggtgtggagtatagctacacagtaactgccagcaacagccaagggggtattttgagtcctcttgtcaaagatcgaaccagcccctcagcaccctcagggatggaacctccaaaattgcaggccaggggtcctcaggagatcttagtgaactgggaccctccagtgagaacaaatggtgatatcatcaattataccctcttcatccgtgaactatttgaaagagaaactaaaatcatacacataaacacaactcataattcttttggtatgcagtcatatatagtaaaccagctgaagccatttcacaggtaggtagccatgtctcggttttctgagagtaagccactgctgacctttctattgcctgagcccttggtcagttctaatgaagactctaaaaatgggatgcaaggtgtccccaacctccatccacctaaacgtgcatagtagacaaagcacatcctcacccaagcaaagcctgcttgcataacctccagagagcagaattctttcaggtgatgttttgagagtcagtgtttcagaaaggtttgcaatgcatcctggtatctgaaataagtaggacagagatgaggctagtccccctggaaatacgcaggcccctggacagttctgacagccccgatagggtcatctggccagactgtgaagaaaatgatgtattattttaaggttaaaaagtgccaatcaatgagcgcaattaccagccagagttagactaaaacaaaatttgtttcgtgaagagccttcttatcaaatccagcacttcttccaggaataataaggcttctctgactctactttcttatggtttctcaggacagtgccactttgctagctcatgttttcctagcggtcccatctgggctctgtgacatgcatggaagtgcgttgttctccacacaaaagaatcttgcccattgtttaaataattgtttggcagttttccccatcacattttaagtaacttacatccccagagagaagggtaataagagacattttatgcttaaaatttagtaaaatgaacagaatcacttaaaaaaattaaaggctgaaagagtgttgatttccaactacctcaggtaaaattcagctattattgtaatctagtgatgtgtagattagatcctcctataattacctctgatatatagtgctgttgaaatgaaacattcgtggttttatgcatctactcatgacaattatttagggtctattaaatattaaacagtaattaaaacttcctcaggtatcctctgcagctaatccacatgctatgtgagttggcttttatattaccttacactgattcagggcattaaaaaggtccactgtagctgcagagctgtatattctagactggcttcctctttacctgactgtacctccaactttcaaaaaccatatcaatttgctcccttttgaaactcttattcaaaaagtattctagaggtgaaagagtttgtccaggcatgaaaggaatgctttttccaggctggaaagaaaagtttaatttatctgataaattgcaaggatatttaagaatgtgagagaaatctcttcattatccactctaactgaatctgtaagtggcattgacataaaacagagtatcacttctatatgaagttggagttcatgcgtggttttttgtttttgtttttagtggattaatgttcactgaatattgcaaatgtgtgtgtcctcctttcagcacccccagctggtcagtaagaagaaatagtctgggaaagtcctaagtagcagaaggaatccagcccaaaatttaaaaactaccacggataacccagaaaatgaataatctttatgtgggaaatcaaaattgacttcacagaattgcttagaagtcagatctaccatacacagctatggatttgatcaccaataaactggtagccctgtcatggtggagatcggcatgagaggagaaccaggggaggaggagaagaaagtgggaataaaataagtcacaaagggaaaaaggtgtaattaagaaagcaaaaaggtggaagagacagaacatgtacaagaacagaaagcagtgattcaaagagcaaagaggggaggtagaaaatagaagaggaaaaggctagaactaaaaggaataaaggtagaaagaagatagctgggtgcctgcgggaaaattgaaggtgtcataaaatcaatggtggttgggaatagagaaaaaagtgctcatttacagccataggcactaaatactcacaaaaactcattttgttggaaaggagaagtccctgctatgtaaatagaccttttcaagtagcagagaccagctatgaggcaaaacataattgattagttgaatttaactggatggtgataaggtgtcttcatgattgataatctggtgtgtagttgggttaactttggccccgcaaggtctttgtatcatgtaagggaggctgttttaagctgttaggtatcaggtgaggggatttattaccactgagaccgtaattccatgatgttccttcatgacctggaaacattcctgggggatcattccatgatgttccttcatgacctggaaacattcctgagggatcatttagctctagctgcaaaggtaggagtccaggactgctgagaactgcttcatactttctaaggtctgcattcttcattgctatgttaagtaattctgaagagtaccagaattttcatgccggaaagaatcttgagagttatttattccatacatccttgtttaggggaagaattgcactcacccctttcgaacagatcaggaactttagtttagaaagccagggggattttgattgttcaaaaatttccatggaaatataatttttttttgagacagagtcttgctctgtcacccaggcgggagtgcagtggcgcaatctcggctcactgcaagctctgcctcccaggttcaagccattctcaactttgttattcttaagaattagctgtgaataagaatacatgtaagcttgtcttttttttttaaggcctggtgttttaaagattcttcccatgaaaatctattttgctgaaaatcactaatttctgccttatgtcctgaaggtatgaaatacgaattcaagcgtgcaccaccctgggatgtgcatcaagtgactggacattcatacagacccctgagattgcacctttgatgcaaccccctccacatctggaggtacaaatggctccaggaggattccagccaactgtttctcttttgtggacaggaccgctgcagccaaatggaaaagttttgtattacgaattatacagaagacaaatagcaactcagcctagaaaatccaatccagtcctaatctataacggaagctcaacatcttttatagattccgaactattgcctttcacagagtatgagtatcaggtaagaaatgtgtattataaacaattcgagctgattgtttgcacccgtcagcacctgcctgtaaaaatggtgcacaatttgaaaaggcacttaaagaaatgtaggacttaaggagaataataatattccttaaaaatttttaagtggtaaatgaggaaaaaccatgttcattgcctttttcattttcttggtttttgagccatattatatacgttgtttttcttaagtagattccaggtgaatttgcatttcttattagtaaagtggtttctgccattaagattccctctgtcagcgttgccttggtaggagacactccttatttaaagatcactttgaaaataactcattactcgtaccaaaataaaatcaaatagcaaacatctctagcctcggtgctcaagaaagatacagaatgttgaaaaaagtctagaggaatacaactcacctgcccatggcgatgagttaagttttctctgaggatggcctaaaaaaataagactgcattcttaaaaagccaagaattaagaataatattcagaaaatatggtgaattctgtggaggacttctgttaggtttgttttgttttgccatcagagtccatttgcattcttcttgtgataacaacctcatttcctgtgggagaatgtgcttcccccaccctttgctcaggcgtggtgggagtgtcaatcaatgtgtcaggctgtcttctagccaagtggtgggcacatgagccgctcagcccctcagatttgcctggggcttgatcttcagcagagtgactcagaattttaaaaggtggaggtgagaagtcgtgataaaatatccctaacctcaatctaaaagtttttcttttccctgctatttccaagcatggttcttcaaccgttcttttaattccataaactcacagtaaattctcatttgcttaagtcagaatcagtgcctcttgcttgcagtcaaagaaagcttactgactgatgtaagcacttaagtgccaggaacaatgccaacagaaattttctaaaagaggaaactgagccttaaaaagcttattataacatgaaatactaaaaataataagtcaccaaaaagatagtgaccaaatcaatgagtacagtgaatacagggaacattttaagcatgaaaagaatattttaggacaataatgtatgggacaaattaccgaattaataagatttaaaaatataaataaattctcgaatggtttggaaaaatacacagatataaatccataatcccttgtttgcaattccaagtctaaaaatctcttaaaagtattttcttgctttaccacaagtcatttggcaacaaaacccaatctaaacagacttgagactatttacagtatttatttatcccatttaatatgaatatttatatgttttgctacaaaaatattgctttattataagatggctaatcagatcatggtatggatattacaaaatatacagtatatacattttatcctatttcaaaatctaaaaacaaaattattttaaaacacatcaggcccccaagggtttaggataagaattgtggtttatgtcataaaggaacaaaatacttaccgatgccaccatcggaaacgtaacactgttagaaacagccagaacctacgtgcctgcccttttgttcttttctcattacctttattgagaagtgtcacgttatcaagctgtcagttatctagtctcccttacaaataaaaatggtaccttcgtgagagagctggatgaaatcagcataaaatcttcagccgctaattaaacgcaacttaatgacccatatataagaaacacaaactttctctggtattgtgttgtgtcattgggttaaattctggtcacatgatctgtggaagtctcattccagtttttgtttgtttgtttgtttctttgttcgagacagagtctcgctctgtcacccaggctggagtgcagtggtgagatctcgagatctcaactcactgcaacctctgtctgccaggttcaaacgattctcctgccttagcctccagtgtagctgagattacaggcatgcaccaccacaccaggctaatgtttttttgtatttttagtagagacagggttttgccatattggccaggctgatgttgaacccctgacctcaagtgatcagcctgccttgacctcccaaaatgctgggattacaggcatgagccaccatgccaggccccatcccagttttctatggaatggaaagctccaagcatgtgccttgtctctagtcagatttttcatcaggcactaaggatgactaagaacaaagggacccacatttcagaggagaggcaagttaagaaccttaggctgtgtggtttcttttgtaactgttactatcggctctgtgttacactcctcctccatactcatctcactcaaatgaaagtatttaatttggtttttgatctccaatttttatttattagctaatcccacgtagttacaacataaggatagaaaacaaagaaaatcaaaatctagcttagcccaaaggcccagttcttatggaaaataatattttgaaaagcatagattaaatgctgaaataaatgatcagaaaatattagtttcatttagcctgtgtaaatattgagtctatgtggaccctgagtaatcttacagaagtcatttaggaagttatatactaaaacaatttatttttctttaacaaaagagcatttttgtatttgtgatgaatttgcattgctctcaaaaccacttgagggttacttcatctgcaagtggcctttgaaaataccttcattgtcctatataaatctgctcacccagcaactgacagtgatttcacccttctgcagaggagtgtgtttttgaggtaattgtagattgtagggaataaaaacaaagacctgagaaacttcctagcagtggggaaggattaatcagaagatcgtgaggatgtatagttggggaggttgccacccacatggtgtgccttgcaagtatcagctggggctccccaccaccttcctacactacattacatcattgtactcatttctggttttgagttaaatcattgaaggcagttgttaaaatttagttatgtgaaaagaacaagacagttttcactagtctaaatcaactcattccatcagttggccagtgatagaagagggtatcgcatggataagttcttttgtttttctttcttcttttttttttccttcttctttgtttttttccttcttcttctttttctgagacacagtctcgctctgtcacccaggctggagtgcaatggcacgatcttggctcactgtaacctccgcctcccgggtttaagcaattctctgcctcagcctcctggtagctgggattacaggcgcccgccaccatgcgtggcgaattttttttgtatttttagtagagacggggtttcatcatcttggccaggctagtcttgaactcctaacttcgtgatccacccacctcggcctcctaaagtgatggatgagttctaacgggcaggagggtcaggaaatatctggagaaatggatacttatagagagggaggagctactcactgcagaaaaccaaagagggaaattaaatgagcagcaaatgtcactcacctcaccacaattcatataaccagcttgataactagctcctttgaaggtgagcaaaatccatgtgatatcacaagcaccttctaagtgttcactaatacttcaatatggaatgccctaaaggtagcatccccactgtttacagtacaagtggaggacctaagagcttgttcaaagggcagactcctgggtggaatgggaagggaccccagcaaccagtattttttttctttttttgagatggcatgtcactctgtggccatgctggagtgcaatggcgcaatcttggctcactgcaacctccaactccccggttcagtcaattctcctgcctcaccctcccaagtagctgggattacaggcacacaccaccacgcccagctagttttttgtatttttagtagagatggggtttcaccatgttggccaggatggtctcaatctcctgacctcatgatccacccgcctcagcctcccaaagtgctgggattacaggcgtgagccaccgcgcctggcctagcaacctgtacttttaacaagcagcctggatagtccacaacccacttttttttggaaatactgcctcagagggtgagacattgctgctatgctacttaagccttattttcaagcggtgattttctgaatcagtggttctcagctttgtgcattagaatcacctggggaaatttcacaacattctgggtgctgatacccagtccccattcccctgtagttctgattctgggatgggttctggaatccctgcgattcaaaaggttcccaggtgattctcatgtgcagccagagttgagaatcactagcctaaactgtcataaacagcccaaataagtgaagccagctccccacaaatgcctaatttacatgatgatcattgataatagcctattgacgttggtctatcctggctttcctaaagaagggtcctattgttttgatgtgaaactagaaaggagaacagaatatattatctacaaagtccatgtctcagctactcatataatttattttaatcttcctcatggattttatttggattttgttattgttgttttattttcttttgtttcttacttgggaggtccggtctttggtggtaagagtaaagttcaccatcatttaaaacaggggatttttctagtttgagtcatttcagcatagcttccagaattctgggattctgaaggataacactctggaggattagctttaataaagccagtgagatctaaaatatgaatcaaaaaattaggaatattactttttcttgttttccacaagaatgggttggtggctttacagagtgcactgcagggtcccattagaaagcaaacattctctgtgaatttcaaatgcaacttagtttaccaaaatctaattctcaaacaaccctgtgaatgtatgttccatgcataaatgcgatgcatctgtactaaataaaattcttccattgcacagacctcttccttaaacagagatcacagtcttgcttgtgctacagaatatttacaaatccaagaagatttttttaaagacaataatcatttctatcttcaaccctttcaaaattgggctattctaatacatgcagtgtgaacctccaaattctatgtggagcagttcttaactgtttagcagcaaattaagacaatatttttcccacaggctttgagagggacctgggtgtgagtctactctgttaagacattttggtttttacctttggggagtgagctgaggctaatgaatagctctcagtaattgtgcattcatattcatactcttgcttaaggcaaagactcaccacggatttgatagggcccgccaccaccccccctttcactgattcatgctgtcagtgacttaattagttttcctgaaactatctcactttgacagatttttgcggtaagcacccacgcacactcagggtctctgaagcattctggtgcctcatgactgggtgactgagaagcagtaggtcagtcttagaggaaactctgtgactcatggcatggggtctgaacttagggctagtgctgcaggagcccatgcagaatggcagtctgctgctttctaacagaccaacactgcccccaaacaagaggatggaaagaagggctgtggaggagacacagaaggggatcctcactgttgctgccagtggcagctgcctgaagactgccagaggtactgtggaggccttccctgcaccagcccccaccataggctaccaaatcgttggcgatgagttagaagtgggagggagaaaggccaacatcttctactccttctctcactacttctggatatttgagcacattaacctctttgggcctttcctcataatataaattaggcctgctatgatggaatatcatagactgggtggctttaaataacaaatatttatttcccacaattctagaggcgggaaagtacaaggtcaaggcacctgcagattcagtgtctggtgagggccaccttctggcttacagataatggtcttctccttatatccacatataccaggtagaagaacactagtccccttcatgagggctccaccctatgcaacctaataacctcccaaaggcctccataccatcatattcaagattagccttcaacatatgtatttgaaggggacaaaaacagtcagttcatagcactcatctataaaaggaagcaccctccagctctgtattctatgggcagagtagtggtaagctacaggtatataatttttagaaagtctaatcaaactttatcttctcttgattggtttttgtaatctacagtttgtaaaaccctacaaaataaattctcacccaaagcaacagaattttctaatggtatttagctttaagttgtgttgatgcaagtgaatgtatgaaatcagcttcagataataaatggatatatggttattcatcaccaagatggacacatggaaatataattagttgtgtctctcattgaaacctaacatatttattcactaatatattttttaaagtatagctatattataacatatgaatgtaaataaataataaacttatttagttagctacaaataagtctcatttatgttcctgagaaaacccacactatcaaaaagttgtcatgactatttcactacaagtaacagaaagccaatgtaaactaagttaaacagaagggaattgtttctgctctcgcatctgggaagggcattgaaggaatcccttgaaaccaaagaaaagatatgaacaccaggtcctggaaacctgggatgcaggactcggatgatgtaggattcattcattctgtccctccttgccccatctcagcttgtctctgtttggcttcattctgcacactttcaccaggcatctgaggaaatcactcccagattcaagccctttctgtgcatcagttttcttgtctttaaaatgtgaatagatatagcattggactcataggcttgctctgaggttaaatgagttaatatgtgaatgtgcttggaacagcacctcatacatagaaaccacttcgcccatataacaataatgattattattattacccatccaccttagagtggaaagaggactataagtcaaccaatacaggactctgactgatccttttgcactacctgccttcctgtgaaccaagagaacagaggactatgattgagcaggtgtggtcgcagggcccacctcctacaggcagggctgcatgaggtatgcgggaaatgcttccagccagaagcaagaactgccctagcacgctacacacaccaaccacgggaacaagtactccacacctgtgagatattgacaatccttgtgctctttcacattggatgctcacacccttcctgttttccaaatgaagaagctgagttaagatcacatagcttgtgcaagaaagatacttaatttctgataacttcacctttctcatttaaaaaaatgggtgtgttatgagaactaagaaatctgtgtgtctagtaggatgcctgctacttagtaggtccatgcccccatccgatccccccaggatctcactagttaaaagaaggagaaactttcattcaagactgtaaaaaagccaggttaagacatttcttttgtctatatcaacaagtcattgataaaatgttagagtgtaaaaatctcaatcaggagtacagttgcctctaaaggtgtgatactccttccgctaggaagttcaaccctcctcatccttgccatttctcttctcagaaaaagagtaatttacccacatacccatgactaaaattccaaactctgatagtctgactctacttttatgcaattagctacttgctttgtattgcctgttttctattgctgtcacccttaccccatctcttttctatatcacatttagagaaaacatattgaacacattttctgtttagttttggacttgcatttaattaggtattaatctcactaatgtatttccgaccagcatggaggtttttgtctggttaatttctcccacaagaactaagctccccacacccaccccaactcccacagctcaaggttttaaatgatttattgatattgtctgactcaggcagtgtatttattctaaaactttagggcctgagtgcacaggttagactgaaggccactgggacatttccatgtatagaaaactaaagttcgccactaggcccagggcctgatcattttttgcatcgagccttttgttcccacgggagatcatttccacctgtcagtgtgagcacattcaggagcatgctctaattctttttgttcttgttccatctctcatggcaacccttaggactttattctgaagcttctgttgttggcaatcttcatggcgcctttgggacaagttatccatgtgaagatgggttggttctcaccctcttgcagatgcaactcagatttatatttcacttaaggtgatgttgatcttcctgtctctgtgttggaagtttgtttgctgaaaataaaatgttaaacacaacagatgctcttcaactgaatgtagataatatgccattccagcctgccctcatggctcttcagatggccatgaaaacaaaggctcccaaagtcacctaaaacttaggtcctgtaaaaacatctaggaaagggtaagatgtgttttacttattttcctccatcctgtaaattgagtatttaataaactgtccttattaagcacctacaatgttcaaagtgtatacctagttactaggattgaggcaggaggctaaaatccatgcactctccccttcagggacttaaattatagttgataagtcaaataaagatgcccatgaataatgtatccataaaaatatggctaggaacgttgatgtttgcaggatctgagtgatggcaaaacagacccagggaggaagaagcagcttctttatcttcagggacagcacgatttccacaccaaactctaaaggccactcttattctactctctggccagatggttttgtgcaggacaggtggcaccttgatattaaagaggtacttgactaaaatcattccacagagacatgaaggggcaccatttctctgttccttcagtcttacaaaaagaaatccctttctaaatctccatccttatgtttagaagcctctcttagcccacctactgttattggtacccatgtaatggttcaaaatattctccactgtatcaatcgggatctcagcaggaaacatatggcacattcaaagggtatttgaagaaaatttaatgaagaggctatttatggaggtgtgggtagaattaagagaatcaataagggatgttgaagtacccagggagtaggaagagccagaagctgttaccttctaggcctgcagggacaatggaagaaagtgggtcattgagaggaaattcagccttgtcaacatgcagtgccaaagagaggagcaggagaaacaaagaacctgaactctctcttccctttgatcaaaacctaatggaaaggagccagaggagaaaagattccaggtgaggcagtctgatgaagtcagcattccagagtacagaccaagccagagaagggcagaggatggatctggggaaaaaccagctcgtcccccacactcagattgatgctgcttctcaaccagtatataataatgccttcaccagtagaatcctttctgggctagaggatcacctggccagctttggcttgtcaatctatgattattgataaaccactaagtaaatctgaagacttaaggaggattgtacttaagtacttgaaccaacagcttattacctttaaattgtaaataaacatctcaggatatatgaagcaatctaatctgcaggtggaaacaaaaatgttaacacattcaaataagtcagatgccttaaatggtaatttgtaagaacatagttgagacttcttcttgttaattgatttatctgttgatggagctgatcattactaatatgcctataagcatctagaaaactgtacggttctctctttgattcctataggcatatttctaatggaaaccagtaataaaattcttttctctaaagaatccattgaattgctctaattttttcttttgttcatgtttgaggactttttgagaaattttaactaattataaaacaaagtagagaagccatccaattaacaaatttcattgtagagcaatatttttgaaaagccaggcttttatttactctaaccctcaaagctctacagtacagaagtacctggaagaaagatacacagggaggtgtgggctaaattccaaatgctgtggggagttttccaatcttattaatgtgtaacaactaactggaatccaggagtgagttgcacaattgctatctagccccactagatcccccaaactgttaagtcattctctcctgtcttttcacacaaataatgtgatagtaatcactattatttatttagggtttgctgtgtgctaagggctgtgttaagaactgcatgtatattaactaatttaatctcaaacaaccatttgaaataggtgttattactgacactattttacaggtgagaaacatgaagcattgaaaaattagataccatgcccaaggatatagagttgataagttgaaggactcaaattcgaaccttaagattcagtttcaaagactggtttcttaaattctaccccaacagttacctccaaattgcatttgtatgcagctttgggactttcaaaaatcaatgaaatatttataaatgtattcatcccctaccccattcctcagaaatttctagaaacaatattgcatgtaaatcttaaaatagtcctgtgggatagatgttgttatttcttagcatagtcaagaacctgaatgatttagcaagttacctagtcaaaaagcaacagagtcagaactcaagtcctgactttctgaccccaagttcaaggtggctctgctgaactgcagcttcttcaagtcacctctatcaggagcacaaattcctgaccctgtgaagacagaccgattagggttgcagtctaggctacatgaattaccaattctggatcctcagctattaatttaaactcactaaacctcagttttcttatctgtaaaattgagattaaaaaaacaaacaacaacaaaaaaaacttaccccaggaaagttgctgtgaactttaaataagttgactttaaggctagggtattgtcacttacaaaaaaaagtaaaatttaatatataaatacatagaaggtgttcagtatccagcattcctgcaaaatgaaaatcaaataaagtcactctcctactgcaaaccctacttcccccattccataagatgcaaactcctctctagttccatgaggactttcgtggtctcatttttgtccaattctgtcctcatcccattgctttccggcccttactcactaaggtcagccacactggccttcttgaggatctagccttaaggcctttgcacatgcttttcttttccatagaatgctcttccctcagatcttcatctggtactttctgccaattgtttcccagcttgatggtcatctgttgagagaacctcctggataagccaaccattttctgctctatcaccttatgtatatcaccctacaatctcatcatttcctttctagcatatatcctaacctgtttattttatttgtgtttttattgattgcctctcctcaccaggatgttaatgccagccttgttcactgttgtatccccagctcatagaacagcatctggcatatagaaatggctcagtcaatatgtgttgaattcatggatgataaatggtcttacctaatttactatccttcacggagatgttaatcacaattggtgattgtgatcttagcttcttctagcaacttattgtggataaagtatatattttaatgctatatccattagggtatagttattattgcagagaacataatggaatttcaatgcatttacacatgtttgaacaggatgaaatatatgagtagtacttgcttctgtgtaatatgcaatattgctgaaagcatgataagtggcacgagagatggatgtcacgttgtttgtgatagtttcccctgtctcacttttaggctaccctccacagaaaaagccagtccacgcagggctctatgaaaagcccaggacagcaacccacccatgtggaaggtgtgtacaggccttcttttaatggccttatgtaggaagatgtaaagagtttgggcttttatgtcacatatctgtattggaaagccagccttaccacttaccaagttgcataaatttctgtgttcctcagttttctcatgtgtaaagtggggataataataccaaccatataggattgtcgagaggaaaaatgcaaaattagtacatagaatacacttacaaaagtgtaagtgctcaataaaccccaaaactacttttacatatcctccatgagagtcggatgggggtgggttcctgtttcctcttagggagagcagatataagaaaaaaaaaaaagtatgtgataactccaaattttgattatttagttttattgttaaaagtgaatcagggttgggaggccaaggcgggcggatcacgaggtcaggagatcgagaccatcctggctaagatggtgaaacaccgtctctactaaaaatacaaaaaaattagccgggcggggtggcgtgcgcctgtagtcccaggctactcgggaggctgaggcaggagaatagtgtgaacctgggaggcggagcttgcagtcagccgagatcacgccactgcactccagcctgggcaacagagagagagagactctgtctcaaaaaaaaaaaaaaaaaaaatcagggcaaatttcagtatttcacagtgttaggtcagtttttccttcttcaggtattagaggagaaccatattcacaagtattaaatggctccaaagagcaaggcggtatgagaagcagtagcgacaagacacccaattctagcatgggaaatgtcttgttatttttccagtagcttcacgtctctgaacttcaaaagtgctcatggaaagcaagacaatgtcctgctgtaccctcttcccctgggtcccagaattcaattaaaatcacgttctatcttgcctaatccaaagtgttttagatgaagggaacctggaaaacgggactatatctgtaaaagtgtgactgtattgtatccagcaaggttctatgcagatagagatgctggaaaacatccatttgatggtgaaagaaaatcagatagatagacagttaaataaatagctcctagagcttttcagcacattattccttcataactggagcctgcagggctactcatgaaataaaacaatcttgtaatcatgtaatttcaaattcattgcattgtcttttttgccaacattctttaaccgcgattccagcaaagaagatttcagcatattgctattcaaacatattcaaaacctatgacaagctaccctttaagaaggcattagcgtgagtgccatgggaaaatgtactccaaggttgtagatgaattgatatgatctccttgattgtatctttttatttatgaggcataatttctgagcactggaaagcaaactgcaatgagtgatgactaacaacaaccaaagtcataaatcagcagcagtgaaagaagtagtgattttgatcgaatctattgaattagctgttggccttagccaatacaggtattggaaagacctttttaatatctatttgtccccctcatgggaatgtgataacaatctcattacatgcccctaggaaacaaataatttaattgtttgcccgttaacatacaacctgtttacttattaattactggcatagctgttcatgctagattttttgtttatttctgatgtgaattgttacaaaattatgttcacattccttagtttttataaacaattatgtctccttagagcttcttgatataaatttgtcctcagaattgttgaaatgctttttttaatcaaatattgtcattatcccacaaggaagtatgttacagagtttcacagaagttgcagagagctcagatattcttccctctcttaatctctgacagttaacacttttactaatacaactcttgtaataagcagcctggataaagaacaaaaatctcaaattgctccaagcgtaaagacagtcatcatcacttacattaggagttaacagattagagatcttttgtaaaagattaatcggctgaatttggttactcctgtattacaattttatgaggagaataatagcaaatgtaagaccaaatagacatcagcttggtgctgacccatatacaaaccatccataaaccatatattatgaagtatgttcccttgatttgaacaagacttgtagcattgccttggccaaaagaatcataaaatattttcacaatttaggggtttttcttatgataccataaaggaaaaatgcatcaggaacccccttgaaatgtacattaataacttagctttgctgtaagacaatacttggaaaacatcagtcctaaggaaggttatttcagaaagatatgagacattgagcgaggcaaagcattaaggtgaaaactactttgtttagccaatacaggcattagaaagacctttttaatatctatttgtcccccttatgggaatgtgataacaatcttaacaagttaagtgtggaaattgtgctaaaaaataactagcacaggccgggcgcggtggcttacgcctataatcccagcactttgtgaggcggaggtgggcagatcactaggtcaggagtttgagaccagcctggacaacatggtgaaaccccatctctactaaactacaaaaaattagccaggtgtggtggcaggcacctgtagtcccagctactcaggaggctaaggcaggggaatcacttgaacccaggaggtggagatcgcagtgagtcgagatcgcgccactccattccagcgttggtgaaagagcgagactctgtctcaaagaaaaaaaaaaaaaaaaaaaaaaaagaataactagcacagtaacagaagcatccaaagggtcaccattcttggagatttctgatacatttccccttctcccatcctgtgcagactgatggtcccttctctttcccattcacaaaaattattacaatgcttctgttcacaaatgtttgcttttctcctagaataaaattaggaggagaaatgttgggttgagagaaattgggagcatttagaataatgttactctgcactgagagaaaaatagactcagcaatttctagaaatatcaaggtttcaagaaattactccttaagtgaaaattaggaggcaagaagtggttctacaaagtcagtaaactctagttctgtttggaactgtgaaaaaacacagtaattaactctatgatgattattgaattgtgacatattccaagatacatttattgtgtttatttgaatgactaaagttaatgtgaagtataactctaaagagacataacaaatagaaattgaaaatgtacagtgcctatattctgtacctggctctataaagaataggcctttgtatttttcaaataatattgggtgtaaaaagcgcttggaaatatgttgaaagggcagagtccaaggtcttctcaccagaaattctgatacaggtacccaaaatcattttgatgaccatggctaaggaatatattgtgacaaagacttctcttaaaagaagatttctaagaggcaattttcaagagagaacaaatgattaaattcattgttttcacagcaatgtgattatggcagcttagtggcagatgttgacactccatgtaattaaaaatttttaaggcaaaatacaataattagtcctttggggtaggaaagagtaaataaaagaacaatttcatttttttaatgaacaacaagcataaatatggtaatagtctctagttagatttaaaaatatattacattgaaaacagaaattccattgaaaactgacatattaatctatcattttgctagttaattacagaatttgtggctaaacaattttagtttttatgcttattaaaagtagttaatctatgttttctatgacattttacattgtaactttcttcatggttacaacagaaaccttagagaaataaatcaacaagtcagtcagtcctaacttttcattattaacgactagggaagtttctgactctacaatcataactgtgtgtgcacccactcattcacatgtgaaagtgttcaccaaacccaaataataatgtatttcagcagcaactttaatcatctttaatcttttattataaaagaataaatatgttcagtctatgagaacacatggacacagggaggggaacatcagacacagggaggggaacatcacacaccagggcctgtaagagggtggaggctgggggagggatagcattaggagacatacctaatgtaaatgatgagttcatgggtgcagcaaaccaacatggcacatgtatacctatgtaacaaacctgcacgttgttcacgtgtacactagaacttaaagtacaataataaaaaaatatatatatgttcagtctaaacactgtaggaacaaaaatatcctgaataaatcaaagatgaagaacatcttggcttttttttctcttggccatagaatttataagccttacttgcttttcttccccaataataactcttccatttttctaggagaagcccacacactaaagaaagagaaaatacacaactgtttgttcacaagatattttatttattgatttttatatgggttcattgcaactaaaagatcgggacatattgctaaaaagttttctatgtgggatctctgctgcttctttctctaccctataaagacagaatcgaatcttggggcattgtttctcagtgggaatcataagcataacctgttagtatttttaccctgaaccctgaactacacttcaatacttttatctcttgcttagccgggcatagacaaaaatccacagtgatattttagacaaagaacgtttttacctcagcagagacagagacaaagacagagagacagaaggagacagaaaaaatattattcacaggttcttttttccttttctcctagtggtttgatataacagagacactgcctcatcatacaagttttgtgaaattcataatgcttcattatctcagtcagctttctcttcattctgttttcattttcacagtagctcatgtaaataggttgatcctgctttgcataagcatgttgatttatatgaatgctattttgatctcaaattgattgaatactaaaaagaaagtctaggaaaaagagtaatgtattatgaaggactcctgccaaagacaaaatagcctgcatacattccctattagtgatggggaattttgaattgcctggttttcaaagagaatatttccaaggaaatatagcaaaacactataatactgaggcccaagtgtttttaaaatccagggattaaatcacattttggaactagaactccacctagtagaagttcacgtaacacaggaaggctgagatttagtacaatctacgacactaccattaaaaagccttaatagtatttatgattctatatctacattgaaaatgaaagaaaagttaatgttcataagccagagccagaactgtgctgagcacttgctatgaattatgcttatttcatctcattttctttcaacaccctatgcctgcactacttccatctcctattggtgcacagtaattaattggcaagttgttgaatttttcttttattatacctagttgcactttcttcctcattttcctccccatccattgtagcctgaatttaaattctgcctgcgctcaaatcaccaaccaaagttctgctcttggcaaaaaacgtcatatcaatatttgcaccttactttgcattcctttgtcaagaatattgttttaaatcttgtcattcattgtgtaataataggtgtcccccccaccacttcccagaaagatatttgcagtaaaagaggttgttctggggcacagtgaggagacaggaaccctcctcatcagccctgaagtctgacttcttcatgaataacctccacctcccctccctagtgtaagtctgacctcacctatttctgaggggactctgagagcagctgcagttgtattctgatggatggactctaacttccatgaaatctggctctcccattgctagctccttacttccctgtgcttaccaaaacaaacctccctcacctaagacaacttgtacatgtctatccatccttgcaagctaagacaccttaacctaatctagaattgcaggtattcgtctatggacaagtcgtttaattttcatgattctgactattttatttatgcatatggatggcatacagaatcaaaaaccctgctcattgaaacaggcactggagagcagaattcttgtttcagcacttgtaacttttgtcaccttgaacaagatagtgaaattttctgaggctcaatttcctcacctttaaaaggggactagtaatacattctcggctcaccttacaaggtttccattggaaggactaaataagctgacataagttaaagtgctttgtgaaatgtagagtttatacaaatgtgagtgattattatgcaaatgatgagaggatgtatccgagctctaaaaagagcaggtgtatctatgtaagtaggttagttgtctcttttaaaaaatgaggctcctggcaatcctatcagcaaggggctggagatttgcatttgacagcaacctgaaaacaattcaacatcagaaaatttactttcacaaaggaatccggaaaaaaagaaaagtatgaaaaccactgataggagttgacctaactactaaaaatctgtctaatgtttcttctcttgaagatattattgatgcaaaagcaaagtaaacaaaaatgaaactaaactctcactgcaaaatattctcataggttttttctttttttcccccacaaatatctcctattttgaacattctgcatgctttttttttttttcaatactgcatgcctggaatgtgtgtactgtagaatcaaacaagtttttcagatttgtctttaaaagctcgggggcaaatttttagaaaatatataatgtagaagaaacacaatgagaaaaaaatttcctgaagttaggctttcacatgaaagcttactaaggaatactactactcctaaacacgcagacagtcttcttgtattgccatttagatctatcattctgattgatcactgtgtagttggctattattgggcctaatttaaccctatacactcacacatccatctactctgtctattgtacctgacattctacaaattacttactcatgcaaatgacgacctaaggcaaccttttaggatattcgtgtttaattatacaaatggttcttgataaataagattatacatcgttccatatgtttattccctccttgatgaaaggaaatttaattttcatgcagatttggtggggacaatgtttaagaattgctgagttttttgtagtctgcagatccatccagtctgcagaagctgacaaaatcactccacttcccacacagagatgagcagttttttcattaggcttaaatcaacgtgctgcattctgaaatcctaaacggccccctttgtgttcacatggtcaaaggcaaaaggcaaaaaataaaaataaaaaaggaacagcctgctctccttgctctcctgtgtgattacaaggttgcaagatcaaagtttatctcttcctgttgtgtttagttgcttttggttgccaatttcgttttttttcctttcttttttttttttttttcccagccttagggtatcttgcttttgacagtcttgttgatttctctttggaggtctgggcagtgaattctgcaggaaaagcccccagtagctggacatggtgcagaaccgggccagccccaccagaaggtctcagagcccccacgttccatgtgatctcttctacccaagcagtggtcaacatcagtgcccctgggaagcccaacgggatcgtcagtctctacaggctgttctccagcagcgcccatggggctgagacagtggtgagcagcagagctaaaaatccaggactggttgacttttaaaaatcattactatgaaacctttgtttttatgtttttgtttttccctccatctttcttatccttctgttctcagttgctctacggtgaacttagtagcacaaatatccctcagagaagaaaaagtgaaccctgaggaaacatacagaaagtatgtaaactcttagggagagggatgctaaaggtggtattaaagactccacaaacgtaagaaactaagactttaaaggcaatcacactaatttaatttaatttaatttaattagaaaacagatcaaccacttagagtggtggcacatagtaagaagttggcaaatggtaattattggtggtgtaaatgttagtatgaaaacaaaatagagcaaagaatatccttggaatctctattttgacatgcacaaatctctaataatacatggaaaactctcattcctctggtgatttcaagaaagttctaaccctttagaagagagagcagagcagctccatcagcatagccctagctccactgtttgttcgttaacacgtttgaggcacactgggagacaggagagattgctcagggaaatcatctttcacattgtgcgttagccaagccacttcccggaagcgatgctaagaatcaactagaccagttcctgcattatttaaatgaagataccagcagccagcacgatgaagactcttgtctctgtggtatagcttgtgtcactctcaagtttctcatgaataagtggagattataatactttgttcacacaaacattgtatagagattgtgcagatcctggtattacactatgcattatttaggccaatttagggaacaatttgggcaagtgtggagaattcctctgagaccagagtgtcaggtattgaaacacaatttcaacagataacttacatacagggaggcttggattgaatgttaaaggaatattagcatattttctatagggcttcgtactcaataaatatagatgatgtaaatacaatcaacccttgattatccatgcttataaaatgataataaactaaaataatttatatttggagggcattgtatgcattttttaacagctcttcttaatcatatgttctttatgtcaacatgaacattaatttcagtttctgaactcttgttccgaagagtacttattaaaaccacaatgaggttaaaaatttgctcaaaataaaccaaaactttataatcctacaaagatgattgagagaagactatgatattttgtaaaaaccaacaccctcagaggaagagatagactttcaagccctccaatacttatacctgattttaatgtagatctgaaaagattttttgactgagaaattgcatgcaagtaaccatggcagaatatggaccttggtgaatgctgactagacatataattggaaggcagattttgttttttgaaaagacatcactctgagggtcatagactttgatcaacactttgtgtgttccgtgccattttctaatacctttctaaggtaatagataatcgataatattatgccttgtgatttccatcctgctacctcaaacgtctatttaacggttacattatcagatttttcacctatttgtcatacctctctaactgagttggtaattttttgaggataaatgtcatgctaaatgccatgttgtgtctcccagagtgcctggcatggtactccatttgtaggaggtgggatcttggataacattcatcaaacacctttaatgtttgacactgcctttatctagccttccttccttccacagctatccgaaggcatggccacccagcagactctccatggccttcaagccttcactaactactctattggagtagaggcctgcacctgcttcaactgttgcagcaaaggaccgacagctgaactgagaacccatcctgccccaccctcaggactgtcctctccacaaatcgggacgctggcctcaaggacggcctccttccggtggagtccccccatgttccccaatggtgtcattcacaggtaatgggtcaggcagaaggatgaagaaactaacaaggcatgtgtacagacatatgaactcatggtatagcctactctgcacctaggctacaaacctgtatagctacctggcactccccagggaggacttgcttattgaacagatatctatagcaaagtagacaaacaaattgatttgagtggtaatgttacctgcgatgtatttaaatcataaaagcaactaatgatagaaaggagaacaacgaaatgttttacattaaaaagacaatgcaatgtgttcgtattcaatatgctcttcctaatggttatctggaagcattccttctaccagccttcactggaacataagatacctccacagttaaatcagaattgccctgatctaatttaaaatattgtcataaaccactgtttgaaaggaaaaagaagacacttgactcaaaatcatttagaaaaaaaattatttactctaaaaagagaagaaccatttatgtctctcctcttaaaagagggaaatgtcttatctctaccaaaaaggatcactagttgctgggtaaacagcaatgtgtgtgtagatggtgacttctcttatcatttctctggttacatctgctgctcgtttccaatagcattacataaggtgtttctgagagcagtttcctgcaaatggaaattttaaagagcctgtagctctgtgaaaacaaaatgtctcctcacaaaatagaactggttttaaaagagagagttaaactaattccattacccgtcttgactctacgtatccattctcattttagctatgaactccaattccacgtggcttgccctcctgactcagccctcccctgtactcccagccaaatagaaacaaagtacacggggctggggcagaaagccagccttgggggtctccagccctacaccacatacaagctgagagtggtggcacacaacgaggtgggcagtacggcttccgagtggatcagtttcaccacccaaaaagaatgtgagtataagtggctgctaccataagccagagagattggaatgtggtcaggagaagcttgccctgaaactcggagaagccacttttaaaaacagattgagtgggctcaataacactgaatgttactgaagcattgatgaggatgactactgaggaaaaatgcctactggatttaataatatggaagtcaagggaaaatttaagaaggattttcttgtggggatagggtaaaaataaatttaggggaagttaaacgatcaatgggaagaaagaaaatgaacaaacactggtagaccatttttataagaagttttgctactccttttctttgtaaattacatggcataatctctagtatgtccagagagcattgagacatagcactattaggaaaagcaaaagggcaagtgagtgaaggaaagagcaatcaactaattaattgggggcttccttacatttttatataatacagtcacgcatcgcttaacgatggaaatatgttctgagaaatgcatcgttaggcgagtgtcgtgaaaatatcatagaatgtacttgcacagacctacatgttataacctactctgccccataggcatgtgactgtgctgaatactgcaggcaattgtaacacaatggttatttgtgtatctaaacatagaaaaggcacagaaaaaatctgatataaaagataagagggccaggcacagtggctcacgcctgtaatcccagcactttgggaggccaaggcgggtgaatcacctcaggtcaggagttcgagaccagcctgaccaacatggtgaaaccccatctctactaaaaatacaaaaattagccaggcatggtgacacatacctgtaatcccagctactcaggaggcttaagcaggagaatcactttaacccaggaggcagaggttgtagtgagccgagatcacgccactgtactccagcctgggcaacagagcaagactccttctcaaaaaaaaacaaaaaatgtaagagatggtacagggcagctccattataatcttatggaaccaccatcatttctgcagtcttgctcaaaatgtcattatgagatatatgactataacttagattttataaggtatatgctttcattgtttaataatggcaaacacaaaaagtattaagaataataagtgcttatcagaaccaactgcataatttatggagtccagtggaaaatgaaaatatggaatcctttgctgaaaaatctttaagaattccaagacagtaacagtacagcatcaggctaagtccaagactcttctatgtcacaggcccttgcaacagcacaggtcacatgccaaggaagctggtccagcttattataccccaacccagaggcaaccactactaatattttggcataatcaattcttttaatctcctttctatgggtaatttttactatatggctgaaatactataactaaaatttcatagtcagctttttatacttgacgttattgtatttgcatttcccgtggcattaaaaaaactctttagccaccaattttaatggctatacaatattccatatataaattaattgggacattttgttttttttttaatttcccattaataaatatgatgaaaaaatctttgtgaacagatctttgaatgtctggttatcttcttaaattaaattttgacaaatagaatttgctattaatacatcaagtattttaatattttaaggctttggatactagtttcatgtttgctttcaagaaagattatgtcagattataaatcttacctaaaatactctatctggcattgaatatgatgccaattttaaaagcaagaattacgcattcataaagaccaatgtctcacacaaggagcttaatgtgtctgagcaacaacatggtaggatgttagtaacagatcacatttacagaggacttgtttgttcctggcagtattttagcattttacaaataattcttacaacagacctattattatccaaatttacagatgaaaaaactgaggcagaactataaactgtgtactgcgattccaggatgccattcatatagactatgatctgaactgaggctcttggagttagacagtgacgtggccctaaactaaggccagagcttaagtaacctggccagtttccacatctagtaagtgcagtaattactctgaactcatggtcactgagctcagctgctgtctcagtactactctttccctgatcaattcatttcctactctctgtaatcaagacttcaaaccatctccaccttcgccaaacctccctctgccgctcaccctttctcccttcatgcccacaacccagctcacccatttctccctttattctctgcagaactccttgtcttgtaattttccaggaaaagagatgtcttcagtcagtaatttgctccacttcccactgcagacaaagctacctgcatataccccattgctgtcagtgacaaggaaagggtggtccttcttccgtctgaaataaacctgccttccatgcagtgaacttcatccacttcattactcaccatcccttctctctccttaatctttctgtgtatctcactttgattcaaagttccttctacccttctaatgttaaagcaaacaagctcctcttcccctgcagtgatgtggactctactctctctgacagcaaaactttcctgaggaacggtctgcagatgctttgcccatatcctctcttccacttactctttaacttcctcagcactggatgaaaatccctttctaagtttgcctttggcctccatactgatatatccagaaggcatgtttctccaggagtcaccttcactgactttccagtagcattcaacgcaactgaactttcaatgttcaatccttttttaaaaagtggtttaccctcattttcattaccaccctctcctggtttctcctctacttctttggattttcatttttagtcaactttgttggttgatcttcttccgctgcccaaatcttaatcctaaacattttaactttgtccccttgccgtttctctactccctcctttcctcctccctcatcaggtgagttcatctgctccaaggctttggttccaaaagccaaactccagtggtcacctcctagtcaagtgctctgttttgaagtgtatacccctccacccagattcctcacagacatctccctctgaatttctcataaccagcttacattggacaggccccagacagagcttgcaactttccccttcaagctatgcttcctttagtcctcactttctccattttcatctccagcactgggcacagtatcttagattccaatcaatgttgtttaatgaataagcgagtgcacctaacactgcatgtttattgttgacactgctcaatcagcattttttgtcacccatactatattcaaagcaaactgtaatgattcttaatgtgtgctgtctgattttgtaatctcctttgcactacatccagaagccaattttgctaaatgttgcagttttttggttgatgtggccagaaagccagagaacagctaggtgagctttgtaatttataaccaattcccttttgagtcatgaagcttagcttttgccagaattttttttttcttatgcttggaagaacaaagtgaactgatttaagattttcttcctgtggccaggcacactggctcacacttgtaatcccagcgctttgggaagccaatgggggaggattgcttgaggctaagagttcacgaccagcctgggcaacatatcaagacacctatctctacaaaaattttttttttaaatagccaggtatggtgacatgcgcctgtagtcccagctactcagaagactgaggcaggaggattgcttgagtcctggaagtcaaggctgcagtgagctgtgatcatgtcactgcactccaaccttggcaacagagcaagacttggtctttaagaaaaaaaaaaaaaggattttatctatttgtgtttttttatattggagaagcagcttaaacctggactagcaccataggagaagaggttcccttaatccactactgggtcaatagttacggaaaaatacaagaaatgactatgatacaggttctaaaataccacttatgctacttttaactcattataaatactgggagcacgaaaacatgcaccagagaatacaaaccagaaaataatttggggcctggtgtggtgtctcacgcctgtaatctcagcactttgggaggcagaggtgggcagatcacttgacgtcaggagtttgagacgagcctggccagcatggtgaaaccccatctctactaaaaatccaaaaaaattagctgagtgtggtggcacacacctgtaatctcagctacttgggaggccgagtagtgagaatcacttgaacctgggaggcggaggttgcagtgagccgagatagcgccactgcactctagcctgggcaacagagcaagagtccaactcaaaatagtaaccataataatttaaaaatagaatatgcagttttatatagatgtgatcacatgtacactcagcaacgggtctggagaagaagcctaacaacacatttagttccctctgcttgaatcccccttcagtggagagagaggtgaggtgtaaatgtttaacagctggcctgcttgagggaaaaatggcctgatttgaagtgcttatcagtttccatggtgtgaatacccccattactgctctcaagtgaccaacatgacagcactgaacagagttaggaagggatgggttgtagcgtatcattatataatatttccaccagccagatagagtggatgtaaatgacctcgagcacacagacggtagtaaaatgtagtgaaacaaataaaaagttatgaatttggagtatttataagctttgttttaatataatttatttaagtttatataatttaatttttagtagtggccggatttaacaatgactcacaaaattcctgaatatttaacagttggggtgagccaacttcagcacaccactggagagcacccatagggtgaattggtaaattctgttcttttcaacaaatgtgtaccgatgataacaaagtagcatgggccttatttaagcaagcctaggttcagctccttggtctcctaccagccactgacatagagcaagatatttgacctctctgaacctgagttttctcaccccaaaaattaggaatcaatctttacaggattattttgaggattaaatgagataaagtatgtcaaaagctaggagcgtagtggtacttacagctttttcagtcttccttggggaggatttgtaaactcattattctcgattattttaattgcttactctttttcctcaggaaggtctccaaaccctacaggacaaataagactcctatctttctattttcttgctagttacaagctgtttctttatctgtgctgttatgatatagggaaaaagtgaaaatctactgaactaaggtgatggagagaagtcatagacaaataacaatagagtattccttgtgatatcaggcagaatcaatgttggaaaagcattgagatttaaagagggcttgataactcttgttttggtgtttgcagaaaatttttcttatggctttatgaaaatatcttattttgaaagataacaatcaactgtgtctttacggttgaatattacaattacaaaagcataattattccttattttgttatatttcctaacatcagaaatagatggattgatttttaaagaaaaagaatcagattcaatttagtctcactactcactcctttcttttcttaaaagccaatttggtatataggtgaatcttaatgtttttacaaatatattgattattttgtagaaaataagatctcatgaaataaatctcttctgacttgacaagatgacatggtatcccttcatttgtttccacaaaaattattcatttaaaaggtgagccccagttaaggattttctttttgttttagtaaggaactgaaaaatcaagagaatgtgcctgtgaaatgcacacaaagttgcttctatatgtgatataatacttaggacacctgagcttgattatatactaatgtactatgctattgattgattagtcagggccatgaattattatacttgaattactgtttgcaaggctttttaactatcttagaaaacaaactaacagtttgagaaaaagctttaacaataaatgggtgccaaaaggacgtaattcaccatctaagcagtttggtttggagaaaaaaatatattaacttcatctagtccttggggctttgtggcaataaatattgatttgatatgaaaaatagctatctactgtacttaatagtattaaggatactttacctgttaaaaagagggaaaatgcaacaaaatatgagctccagggttatgctggtgagcagatccattgtatgttaatagttttatttataaaacaccactctctatcgattttttttaaagcaggcataaagttgctgagaaagcatttcacacatgttcccattggttttcttttcacccctgatactggttgtttcgtaatactgaggaaaaagtgaaggattctagcaatgttggttttcttttttttttttttttttgtttggattggttcggtttgattttgctcatattttttttttttaaagtgcacacctgcactccttcaaagaggttaccctttttagaacatacaactttctccccacagtgcctcagtaccgagccccattttcggtggacagcaatttgtctgtggtgtgtgtgaactggagtgacaccttcctcctgaacggccaactgaaggagtacgtgttaaccgacggagggcgacgcgtgtacagcggcttggacaccaccctctacataccgagaacggcggacaaaagttagtttctgactcctgtttctcagtgtggaaggcgctctgttccccagctttacgggatgctaaatctgaaagctgaccagcagatgctcaccattaaaatgtcttggtttaagtgcccccttcttgtgaaaaagttactgctcaggataaataaggttttctttccttcccatttgcagcttgacagcactgcagttataatgcagttcaaggggacagcgctgcctccacaggactggagggtccccaggaagggataagacccaagggccagttgggttcacaaaagaaatagcacccatacatagtcaatgactaccctaaaataatacacttctagcaacttcatagattttcttgctgtatctccagtctccaaacagagccctatcaggaaataactatctccaactcatgaggacctgaataaggggtttccttaaccttccttgatatcagcccctgaaagaacaatcttgaccctctaaaatggagttccttcttcctgtttacttacatgtcccttttctccttgccttgtttttaaattgaaatgagaaaatgctttacaaggtgctaagtattttatagtgatcagcatgctcacaggaccaatgttcactatataatgaattgattaatgagtattttattttggctgtaaggtagaggtaaacagtgagctccagcattgcatgtatagtaatagaaacttaataacatttttacaaagattcagctacacatgttcattgttacagttcatggtcacctgggcagctctttgggaaaggaaggtggcctgatggttgggagacacaggttctacctggccaggcctataaccatctgtgtgaccttgcaagggtcacttccctcaggttcctggccattggaagagcaatttagaccatgtgatttctaggatcccttttgagctctcctgttcagtaagaaactctaggtcatttagtggaaagtacacctgtaaattttaaaggaaggatttaaaccgtgtgcagaacaagatgcgctttgtgtattaccctttactcgtctgatgttcttttcctttgctgtataagctctaattttccttagctctattacttatggataggctattattacactaatgatagctttttttcttaaacattttaaaattagaagtaattttgaatattatataaaacgtcataacttgctttggaatcctatttttcatgctatgatgcattgctcttttaaaagcatgtgccctatttgtaggtgttgaatgaacaagtcatttaccagttcttccttttgtctagccttctttttccaggtcatctgcacgactgacgaaggaagtgttaagacgccgttgatccaatatgatacctctactggacttggtaaacaactcatattatacttggcgtagcacctattcatcttcctcaagaaacacacatatgtttgtttatacatacttggagtcctaatatattagcatagactatacagaagaaattgtgccaagtgttgtcagagtttttttttttgttttttttttgttgttgtttttttttgagacggagtcttgctctgtcactcaggctggagtgcagtggtgcaatcttggctcactgaaacctccacctcctgggttcaagcgattctcctgcctcagcctcccgagtagctgggattacaggcacgggccaccacacctggctaactttttgtatttttagtagagacatggtttcaccttgttagccaggctggtctggatctcctgacctcgtgatctgcctgccttggcctcccaaagtgctaggattacaggcatgagccactgtgcccagccagaaattttttaaaaagtcctcatggaacttatatcaggcaaggagttacaatacactctttttttttttttttttttgagacagagtcttactctgttgcccaggctggagtgcagtggtgcaatctcagctcactgcagcctctagctccaggttcaagcgattctcctgcctcagcctcctgagtagctgggactacaagtgtatgtcaccacgcctggctgattcttgtatttacagtagagatggggtttcactttgttggccagggaggtctcgaactcctgaccacaggtgatccacccaccttggcctcccaaagtgttggaattacaggcgtgagccactgcacctggccagaatgtactcttaaaatgccaaatattgaattgtaaatatggaaaagaccagagagctcaaactaaatttttctcctaaccacaaaccctgtcaataaagaattgtatgacttcgcgtgcataaaggtgatttacagaggaagttagaggagagatcagaagaagaaagaaaatattcagccaattcatgttgatcataatgttaatattctagattcaaagcctagaatgataaatttggaaagtgtcttttattctccataaaagattatgattgactgttgatatcgggtaatttagctcaacgggtacaattttaatttttaaggagcatcttttaaactgagttttactcatagtctctgaatctaaatttgtgatactttataaaagcaaattagagaaatgccaaatcttttccactaaaacagattcgggattgatatcctattttaaattccagtaattaatgatatatcaaatttgcatgtatagagtttttttttgaaaaataaacatgtccaaaatttctgaaacacaatttaaaaaaaaaattttttttaatttttttgagacagagtctcatacatgatgaaacatgtatattattgtcaaggatagtttcaatttgtaaaaataacgtattattctatgtttccaaactttacatgtctggatgtcatataaaatttcctacaacacttaattcttctcatacggcttatttcatttaatagcagtggtaggatagaacagatctcatttagtattctgttagcaactccaatatttccccaagtggacaagtggaggtataagggacacaggaatttatccaggaatgctctgctagcttgttactgggatgagaacaccaacacagattttctattgacttctggcctgggactttttctttgcaatggtttgccaagttaagtacgcataggaatcacctcatgtgcttgtttattgtagtttcccgggcctctggcagagattcagactcaaggaggctcagaatctgctctttaaataagtcctgtccagtgattctgacacagggctcagaaccacgtgttgagtgatgccggaaaaccaaggttgctcgccttctaagccctgccagtctagtttccttggtgaatgggaagtgtgttgttcctggaggcaggccatcaacagagacggatttactctgacactggctgtggtttcggttttctttggatctgaggcccagccaccagagtttcaaaccctgacagtgaacctcccatgtgatgcacaggtagagtcccttaaggtgaaggggtacttcaaaaagacagaagggaagggataaagggacaccatcctgatctcgaggtcttcataaaaaggagaaatcccccgttggctcatgaatacgaattgaggtttccactgtgtctggaggccgggctttgggtagagcagaggggaagaactctgaggattgtgcaatgctctggcagattccaagatgtgctgcccaactaatatccatcgtcagttctaattttcatgatgtaacttttttaaaaacattcctgttcccttgcctgaaggcagcctccaagcaggagagtggcagagacctcattttcctctgactgttctaagggctatttcccttttgaggcttccctcgggcaggctgccctcccttcccctgcgtgctgtggagcaaggggcccactgggcccatcagatcagtttctggagttacagccaacaagttgttttctctctgtgccacacacagaggaaacaactcttttagtgtgcaacctaggctggtttgtttttaatcaaacaacacacattggttcctaattaggggaatttcgacctgctggagcttgattggagtgttgactcaaccctttattttagagatgagaagcaaaggtcagagtccaacatttaatcacagagctgatcggcagcagagttagggttggcaaagtaatatccctcctcttacggagttcaaagtttagttttagtcaccatctgttcctgcctttaatagtttcaccccagttctgaacttttttcctttaagtctttccctgctagtgtgagtgtgaagtaccacgcaggcccatggagttctagaggtgttgaaaagggggagatttgtccagtgagtgagtgggctttgcagttgtgtctgcttgttcttctgacctggctgtgggtattagatttagatgagcagctctctggctcacatctccacaccagcctgtgtggccgctgcatcagatccacaggtttctgtgctggccccagcagtggctggatgggagcagatctctggccaccccacccccacccctgccgcacccctgcttagcttgccaagctgacaacataatttcactgccttcgcctatcctgcatgattcttgtcagcctctctcctatcttccccacaagacttaataaacctgcctggctgggtgcggcggctcatgcctgtaatcccagcatgttggaaggccgaggcaggcggatcatgaggtcgtgagattgagaccatcctggccaacatggtgaaaccccatctctactaaaaatacaaaaattagccaggcatagtggcgcacacctgtaatcccagctacttgggaggctgaggcaggagaatcacttgaacccaagaggcagaggttgcagtgagcggagatcacaccactgcactccaacctgggtgacagagcaagactccatctcaaaaaataaataaataaataaataaataaataaataaataaaaataatcctacccacccttcatccctgtaaagctctaagcataggacctggcaccaggtacattcttgttaaatgtgagctacttttattaatactaacttcatgtgcagagactcacaccaactgaactctcaatgtgtgaacgccaagcaaaggtaagtggctccagtgctaaaagatttctttccataggaagctttcccagtgcatttgggtgatggtttgctgagctttgctctttaacagagaggccatgtaaagacaacatggtagcaaacacaggctgttaatatcataatggaaaatggaatctgatgcttcaaaatccagtttgcacgaagtatcaggaattggactgttgcatgaagcaagtacacctcagatctccaaggagtgattttgtttgtgactctgcagcaataatagtaagggtcccagtccctcatgagaatccaagcaaggactttgctcccaagacacacagctatgaaacaggtgaccctcaaggttactttggtaacctcttttaaaaattgctccccacactcccatctttcccagggatttgtcaagacagtggtgatttccaacctgagcagcagcgccagaagtgtcagcaaggcctctcaagggctgtaagcatctcgttataacccagcaacctgctgaaccattaccccaggctgcacacaagtgcaaacaagcagtaagagacaaactgctttctgctttcaactcctctctaatttactatcaaatagcagggccagagatgacaaaaatgctttctgaaataacatttcccctttctttctctgggttttgcaggcttggtcctaacaactcctgggaaaaagaagggatcgcggagcaaaagcacagagttctacagcgagctgtggttcatagtgttaatggcgatgctgggcttgatcttgttggccatttttctgtccctgatactacaaagaaaaatccacaaagagccatatatcagagaaagacctcccttggtacctcttcagaagaggatgtctccattgaatgtttacccaccgggggaaaaccatatggtatgtttgtagaggtgtggccccatttccctatcactggactagaatacttgttttccttctgagaaaaatgtgtcatagccatggtaacaaggaattagatgtaagttatgtttcactaagtgtggggaccaagagaggctaaccctagaacagctttctcaactttggctgcacattagaatcacctggaaagctttaaaaaatatcactgcctggacttcatccgagaaattctcatatccttggtcttgagtagggcctgaagattggtattcttttcttcactccaaaactgattttaatgtgtaactagggatgagtatctctgccctgtaattgtaagccagggcctggtggagaagagttgtatgttgagattacctggggaaattataggttgtattactgtgtaatttggtggcggggaatgaacattaaaaggcggagatggggaggaaggggctacagtgctagtggtgctcggtctgtcctctggtcctgacaccctgtgccacagaggatggatggctcctcttagctatagaccactcactcccaaaataggaggtccagtaaaggtctagtgggagagggccccatcacttggtattacaggacagtcattgcccagagcactcattgaagggtaaaaggtgatttaattccatggtgcagtctggtgtggggctatgtctacctggaggaggaaaggctgcgttttctaatcctcatcaggtacccatctgttcaccaaagctgggcgcccacagggctacgtctccctgaggaggtgccttttttccagtttgcactaaggttctatattagctagtggctaccctaggcagtactaaaattaagcacagaagcctggtcaagctgcttacacttcaacatttaaaaaaacagcagtgagtgaacacagcagcaccatctgccttccagatctcttcacttttccagcactcagcaatgaatgaccactggttaagccccaacatagctggatcagacctaagtagcaggagtgttgggagcacaaaagggcagtgggccctccgaggtccacggtttgtggtttttgtgggaagtagcaatgggacaatgacgtggtggtggagaagcaaagaaggcactgcccaacaccatcagggccttggctctctactcacatctgtcccactcctctactcactcatcctcctcggagcctccttcctccctgagcccatcagacaagctctaaccacagggccattactgctgctgctccttgggtggctcacactcttgcttcattcacatctctgcacaaatgtcacctcccattctatgtaaaatttcctagccccttaacccacttcttttcttttctatagcatttaccacataacactaagtcagatatgtttgtctgactcctgaaatagaaggtaagctcccaggatcaatgatcttgtgggcctcttcctgttgtatgtgccccgggacccagaacggtgcctggcatatcataggcactccacgaatgtttgttgaatgaatgaatgtcgagtgatcacttcgaaccatgggctgtttgctcctgttcagtgaatagtcattaggagattctcactgaagagcagatatttcaaaatttttccttgttaaagaataactttctttaaggagcccatgttcctagaaggtgcactgctgctggaggaaggcagtggaagagagaaaagaaggcaggagagatctgtttagcctgggagatgagctaaactgaaactagggtctatggagtgcatggagtggtgaaagggaggttcccaagcactgctaggcacatctactgtataatgtgaggtgcggttacaggaaagtgtacccacataccagcaatgtccagaagtcatttcagtgatactttctcctgtcctttgacccagtccctataggcaggcacctctgtgtcagaatcctccatgaggaagaacactgtcttccttacttggttaacttagtgaccagaagacactcccatcattcttgtggagatgttatgttactctggatataaccccattgctcagggttttaatgagtcttgttaagcttcgttttgtcaaagtgaggaccatgaactatctgcatcagcatcacataggaggagcaggacctgaagttctgagggagaaactcaataatctgccattttaaccagaacctcaagaagtctgggccaggctcggtggctcacacctgtaatcccagcactttgggaggttgaggcaggagaatggtgtgaacccaggaggcagagcttgcagtgaaccgagatcacgccactgtactccagcctggacaacagagcgagactccgtcacaaaacaaaacaaaacaaaacaaaacaaaaaaagaagtctgatgcacagcaagatttgagaacagctgaaaatgaaataataatataatacaaaacctgtatgcagtgtactgtttgataaccagtagaaacaggtggtgggagggtgctggttagaccttgctgtcctgacaccacacaggctaagccgcctctggggacagacttaggcttcagctgagaaaagcggacaaaagaatgtaaacaccctgttcctgcacaccctttaccatcggggaaatgcacagtggcacccaactgattctttcactgagtggccaagactgagtcaggtgtgaggatgggaaggcatagagggactggctggctgccaggggctctgggcccagggaactggctcatcctcagcagggaagccattcattgcaggcaggtctcagcagaagtgaaatctgggatacaccagggcaccgggtggaattcccctgagcctgttgaatcataatttaatcctatccagttgacagtgtatttgcaagtcttcttctgttgctttttacaaatatttttaaaccaaactgctctcacaaagttggagaccatgagagacattgtcaaaaattagccaaactaaagagagtacaatttgtattagtagagcaaaatgaagtccctgttggtgactgtgggctcctcatctactcaggtgggaaagaatccagtcaaggggaagaatctgaataggaacaagccagattcacctgctcagttttccagattgactgtcttttcacttgagtaggtcaatgagctatgcccctgcaacacccacccacacacacacacacacacacttctccccctcatgtgacaagctctggtttcagtgctgctgtgaccctcttccaagcacccgtcttgtgaacaggtaagataccctttgaacatcagacccaaactggcaaaaggattttaggctatactctgaatggagagaaataggcagaggtgccaaggaatgagagtgtcttttgtatttcatcaacatttttcaagaccatacagtatacagtatagctaagtttaagttttgcttgttatttaattactggtttgaagatcctttcattccctgcaatactaaacaaatactggcagtggtacttaccttagacactaatcaattaatttccactcaccaaggtttttttttttttaatttgtttgtttttgagacagagtcttctgtcatccagactggagtgcagtggcatgatctcgactcactgcaacctccagctcctgggttcaagcgattctcctgcctcagcctcctgagtaactgggactacaggcgcccgccaccatgcctggctaatttttgtatttttagtagagacggggtttcaccatgttggccaggttggtctcgaactcctgacctcaaatgatccacccgtcttggcctcccaaattgctgggattacaggcatgagccaccgcacccggcctcactatgaagttttagttgcaaaacccaactttctctctctcatatatatatatatatatatatatatatatatatatatatatatacacacacacatacacatacatatatattcacatatatatgtatatatacacacacacatatatatacacacacatatatacatatgcaggtatgtatcctaggatatatatgtacatcagagcagtattaaatatgggtatgataatgctgtcattggagaaatgcaaggaatgtgtttaaaactgttccaaacatggactgatgctgccatttgttctcagtttgactctgtggctgatatatctgatgtgtcaagcaatgtcaccctaaaaagttacaccatgcactttgaggtacctctgtgtgctgcatgaatgcatgatcttttgcatggtgtgttgactgcacagtgaaaagcaggaacagatcattgatgacttccatatatccattccttggaaagctgaacaacatgagtgaaaactctactgaaaaaagaaaagaaatgggaggccgaggcgggcggatcacaaggtcaggagatcgagaccatcctggctaacacggtgaaaccccgtctctactaaaaataccaaaaattagccgggcatggtggcgggcgcctgtagtcccagctactcgggaggctgaggcaggagaatggcgtgaacccgggaggcggagcttgcagtgagccgagattgcaccactgcactccagcctgggcgaaagagcaaaactctgtctcaaaaaaaaaaaaaaaaaaaagaaaagaaaagaaaaagcagaaacatttcattgattggaccagctaaatcagagccctcagatatttagagcaactatagtttatcttacggcgcgttctaggtctaaattatgtagtgactttttctctctgatgttaatatcagacctgatgtaatttggaggctggaatcctataagaaatggaggaatatggaatgagaaatgagggagggaggagtcaatttccctacacaaatccaggacttttaaagtgaaagacaaacggagctcacatagtggaccaccatgaaataatattgttatctttggctgttctgggggaggagtgttctcaagagggaggctctgtgctgacatgtatgaagaagataccttgttcacccatcatccgtctgccttgccccaccactttgcaatgcagcaagcccttgccccacagggaacaacagccagagcaccagtgcatgagctctctaggtgccgaaaacactggccacctaacttgagtattagctcatcatctcatccttcttaccaagaaacccagggtcaccgtgttgtgggtgctcatagctgctaaattctgtaggtgacagttgttcccttcattgacaatgtgacaattgtcaggagacagtcattcccttcactgacaatgtgtgagacacaattctctgtcatatttcaagcccatattctttatatgtgaaatactcacagcaacttccttctcaggggttagccgataccaaaattccccggtctgggacacctgtgagtatccgcagcaaccggagtgcatgtgtcctgcgcatcccgagtcaaaaccaaaccagcctaacctactcccagggttctcttcaccgcagcgtcagccagctcatggacattcaagacaagaaagtcttgatggacaactcactgtgggaagccatcatgggccacaacagtggactggtgagttggtttcctcatacagggcctttgctaaatatcccagaaaaaatattggtacagagctgcctgtacttcaccgaatgctgccccatggcactcgcctctgagcacttagccagtgaggtagtaacaaccggtttactaatgttacttcagttgtttgataagcagggtagaaactttgtcttgttcttctggtatgcaatagatgcttaaaaataaatgcttattggctagccgtggtggctcatgcctgtaatcccagcacttggggaggccgaggtgggcggatcacctgaggacaggagtttgagaccagcctggccaacatggtgaaaccctgtctgtactaaaaatacaaaaattagccaggtgtggtggtgggcacctgtaatcccagctactaggggggctgaggcaggagaattgcttgaacccaggaggtggaggttgcagtgagccgagaccgcgccactgcactccagcctgggtgacagagactccatctcaaaataaataaataaataagcagcaaacaggttatacttcatatacttggagcagatgacaggaaacattggaatgggcctaaaacaaggcataaaatacaagcacttgttttactaaaacaaaaaggtactttttttgttttgccttttcctattggtgtatgggtagacgcaaaaagaatattttgtatcaacaggtgaacatggttgctttccaaaaccttaggaaatgatgacaaatgagggtgttactatttataagcttcatctttcataatttcagtccagtgggtacaaatcattggctctttgaaaggtaacctcttcgtgatataacatttattatcagtctctgagcggctacaataacaaaaatcctagaatttttgccaactatcaaatttcattgtgctaacttcctagatgcccgctgcagtacctaccattccactgggcctgttagaaaataaacagataggccaggcacagtggcttacgcctgtaatcccagcattttgggaggccgaggtgggcggatcacgaggtccagagttagatagagaccagcctgaccaacatggtgaaacctcgtctctaccaaaaatacaaaaattagctgggcgcggtggtgcgcacctgtaatcccagctactcaggaggctgaggcaggagaattgcttgaacctgggaggtggaagttgcagtgagctgagatggccccactgcactccagcctgggtgacagagcaagactctgaaaaaagaaaaaaaggaaaaaaggaaggaaggaaggaaggaaagaaggaaggaaggaaggaaagaaggaaggaaggaaggaaggaaggaaggaaggaaggaaggaaggaaggaaggaaggaaggaaggaaggaaggaaggaaggaaggaaggaaggaaggaaagaaggaagggagggagggagggagagaaagaaaagaaaagaaacataaccagctaggaagttagctcctgtgtttactcctctggggtaaaattattcacctccacttctttcaatcatctgcttctgtttttggatttgctctcatctttctcctccaagttctcacttttccttcactgaaaagttgatgacttccatgaagcctttcttgactaatagcaaataataaagggagttcgctggacccaggttccctaacactatataaaaaaatgtaccatccttctggcctgttcagaatgattgtataatatatacatatatataatatgcattttaaaatcacaggctgtttgatgttgttgtaacctcaactacatgagtccatttcagatctaaagtttttaaaaggcagggataattatatttggttgaaacaatgaattgctaactgatcatttttgacatgcaaaacagcaattgctatacattcaacataatacattgaaagttcagatgaattattacatctaatcttcacaaactgtaggaagtaggttctattatcatcctcattttttacaaaaagaactgaggtttagagagatgagtgatttaatgagagattacacagctagcaattatttttatgggtttgggttcttaaaaacatcatctgactacagagctcctatttgtaactattatactgtattgtcatttttgcttgctttttacggtactaataatgggcaatgtgcaaagggactcaataacaagcttttgaaggtgccagtacttggcaagttatctgtttattataacattataaccaacattactaaccctatttgataaatacaaaatacagcacaagagtgggaagaaatggagcacaaatagctagcattctgcctcttccatttaccgtttgaactaaatccatatatatgtgtgtatatatatgtatatatacagatcaccagaggtcaggagttcaagaccagactggccaacatggtgaaaccccatctctactaaaaatactatatacatacatacatacatacatatatatatatagtgtatatatacactaaaatatatagtatatatatgtagtgtctatatagtgtgtatatatatactaaaaatatatatatatacccccagctaatttatttttatcaagtatatatgtacacacacacacatcccactctacagatgagtagactgaggcttctgaggcttaggttaaaatatgacacaatataaccctcaaatcacatatacattttgaattagtctatagttcatgtgtgcatgtgatgtgatcctttcaataagagaaatttaaggcaaggtctgttttagaccccaccatggtgttgagaataaaaaagcctttaatacttattactttttacacttaattgatataactataaattgatagcaaatactattgatagcaagtatgtagccaatgatgattggcttatttttcagtatgtggatgaagaggacctgatgaacgccatcaaggatttcagctcagtgactaaggaacgcaccacattcacagacacccacctgtaaaggatggaaacccagaagacgtaaccctggaatgcaaggtctgcacccatttcctcctgggttatcactcacacatcataaatgctgaaaagccattgtttattatcctataattctttaaagaaatgatgactgtttttgaaagtgttccttcctaatagaggtctaagaaatgatatttttctcatcttaaatgagagagaatattcatatgaaaatacttgatttgctcttattttgtagaagacaaagaagtatgtaattgtcacttggttctgtttggcagtgatgctcctggttaactgaataatcagtggcaatttcaagatggctcacagttgttagaagtagtaagttagttactggctcaaaaatgattctgttgaaaggatgtcactgctgttcatttctatctgccatttctgtcagggttgacacaatcctgcaagaatagttattctaatgatcacagctgctaaatgaatcccaaactttgcaccaggtcgacaaacttttctgaaggttctatttatttaccatacatagggttacttaccaaactttttgacaaggctgaaggttctatttatttacaatacatagggttactcaccaaactttttgacaaggcaacacataacttacacataaatgtctctgttcttgcatttatgaattttccaaaaatctaaggagtaaacagcttatttatacattttgaggagaaaacaaagtgtttcactaggaacacctctacttgaaccaatgtttttatttcatatattttatagttttgaaactagtttctcataaaattctgtcaattcactgaatatcagagaatactgacatcttcaacctagcacatttcaaatggaaactactgttctatttgcaatattaggctgcgtgaaattttaaaaggaaaaatgtatctgttccttctagcattaacatatatacatgtagagacaagactatacctatgtgtatatatatgtatatcatgtatatattactctgcactatatcccttctttttggagaactagccattattttagccacagaatcagtaagaacagatgatatgcaacagtaccaattacggttcaaaaatgtctgtcacctgctctagttggattacaaagtcattggtgaaagtcctatggcaagaaaaattttcttgcaaatcatccacataaaatcagatatttaaatttgttcttcatggaaaacagagtaagaaaacctcttgtcttccttcatccttaaaggtctttgtgaccccaggaaaatattgactctgtctaacacacaatagtcacaatactttttgtgaatctacaaccagagacaggcaaaaacttgtaaagtaagggatagtcttacttattctgcctgaaaacaatgtattaccccagggcccaacagtaaaagattgtggactttttgggtattgagatttcatctagctctgtgagagagcagctcctcagactgaccaactcctagacaaagtttgccaaccataagtgtcaaaagcacaggccagtattaagcagaagttctaccaccttattagaactgctataaacaaaagcatctgaaataattgtgcacatctggcagtgactgtagaaaatacgaaatatatatttctcgccaagtttttatactttctgaaatgaaaacataggattgactagtttactggtttttattcccatatgccgattctgggacaataaagttgtttaaagctggcacaaataagcattaaccaaggctgtgtccaccttctgtgagctacttaaggtatataggaaaggagtggtcacaaacttgcatcctaatccttggtggactcttctaagaatacagtttgctagtcacaaagaatagtctacaaatatgctttgctaggttcagaagattgagtttatcctgatttttgaaaaattaaccaggtatctttatcactgtgtatttttccaagcacagtataaaattttaacaacgcacaaaaaaatacagaactgcaggggattttatcttggatcattatccatttaatcatctaattagacatgaactcagttagctgaatcatttacattttgactccatagcttagggcagacagaagcctgtatggcttctgcccagaactctgtcccctgctacatgtctaagtttacttgtatttatttcagagaagaactctaagatgttgctttgctactttaagtggtattgcgtgccaagcctctattatacaaaccatgcagactcgcctctagagattctgattcggttgatctggggtgtgtggctgaggcatcagtactttttaaagcttccaggtgttctaatgttgagacccactgatgttccacaatctggaagaaatcatgtacaggaataatatgctatgcacagggactatgctccttggctcaccccttctcccttataaacaatgagcagttcttgatgaacctctttaaatttaaatctcctgactcacattttaccaattgtacatgccacattctcagcttacgaactaccatgttttgttattcttaatatcaactgtttggtaagagtacagttgtttttatacactctaagaaatgtgtttataatctactgtaatttccactaaatggaacccaaatattaatgttatggtaccatatactgatgtaaaaatcatgctggcatccatgaacacaccggtaaataaaacatagtccaagtggaagaattcattaataaggaacttttaattatgtcacaaatgaatagttggtttccaatgcacaaatatcatgtaaactaatctaaagatggtttgcttaataaatatttgaatgtgacc

SEQ ID NO: 2 - DNA, 377 bp, Homo sapiens
  source 1..377: mol_type = other DNA; note = USH2A exon 68 and flanking genomic sequence
gttcggtttgattttgctcatattttttttttttaaagtgcacacctgcactccttcaaagaggttaccctttttagaacatacaactttctccccacagtgcctcagtaccgagccccattttcggtggacagcaatttgtctgtggtgtgtgtgaactggagtgacaccttcctcctgaacggccaactgaaggagtacgtgttaaccgacggagggcgacgcgtgtacagcggcttggacaccaccctctacataccgagaacggcggacaaaagttagtttctgactcctgtttctcagtgtggaaggcgctctgttccccagctttacgggatgctaaatctgaaagctgaccagcagatgctcaccattaa

SEQ ID NO: 3 - DNA, 177 bp, Homo sapiens
  source 1..177: mol_type = other DNA; note = USH2A exon 68 sequence
tgcctcagtaccgagccccattttcggtggacagcaatttgtctgtggtgtgtgtgaactggagtgacaccttcctcctgaacggccaactgaaggagtacgtgttaaccgacggagggcgacgcgtgtacagcggcttggacaccaccctctacataccgagaacggcggacaaaa

SEQ ID NO: 4 - DNA, 43 bp, synthetic construct
  source 1..43: mol_type = other DNA; note = ASO_68_1 target site and flanking sequences (+10 nt)
aacatacaactttctccccacagtgcctcagtaccgagcccca

SEQ ID NO: 5 - DNA, 44 bp, synthetic construct
  source 1..44: mol_type = other DNA; note = ASO_68_2 target site and flanking sequences (+10 nt)
ataccgagaacggcggacaaaagttagtttctgactcctgtttc

SEQ ID NO: 6 - DNA, 33 bp, synthetic construct
  source 1..33: mol_type = other DNA; note = ASO_68_1 target site and flanking sequences (+5 nt)
acaactttctccccacagtgcctcagtaccgag

SEQ ID NO: 7 - DNA, 34 bp, synthetic construct
  source 1..34: mol_type = other DNA; note = ASO_68_2 target site and flanking sequences (+5 nt)
gagaacggcggacaaaagttagtttctgactcct

SEQ ID NO: 8 - RNA, 23 nt, synthetic construct
  source 1..23: mol_type = other RNA; note = ASO_68_1
tactgaggcactgtggggagaaa

SEQ ID NO: 9 - RNA, 24 nt, synthetic construct
  source 1..24: mol_type = other RNA; note = ASO_68_2
tcagaaactaacttttgtccgccg

SEQ ID NO: 10 - RNA, 24 nt, synthetic construct
  source 1..24: mol_type = other RNA; note = mmASO_68_2
tcataaattaacttttatccaccg

SEQ ID NO: 11 - DNA, 80 bp, synthetic construct
  source 1..80: mol_type = other DNA; note = constant oligo
aaaagcaccgactcggtgccactttttcaagttgataacggactagccttattttaacttgctatttctagctctaaaac

SEQ ID NO: 12 - DNA, 68 bp, synthetic construct
  source 1..68: mol_type = other DNA; note = target-specific oligo 5' ush2a Dexon68
ccgctagctaatacgactcactataggaaactttgacttaaaggggttttagagctagaaatagcaag

SEQ ID NO: 13 - DNA, 68 bp, synthetic construct
  source 1..68: mol_type = other DNA; note = target-specific oligo 3' ush2a Dexon68
ccgctagctaatacgactcactataggcaaatggagtcctgcctggttttagagctagaaatagcaag

SEQ ID NO: 14 - DNA, 67 bp, synthetic construct
  source 1..67: mol_type = other DNA; note = target-specific oligo ush2a exon68KO
ccgctagctaatacgactcactatagggctctttctctctgaacgttttagagctagaaatagcaag

SEQ ID NO: 15 - DNA, 20 bp, synthetic construct
  source 1..20: mol_type = other DNA; note = ush2a  wild-type forward
aacgggcctctgacagaata

SEQ ID NO: 16 - DNA, 27 bp, synthetic construct
  source 1..27: mol_type = other DNA; note = ush2a  wild-type reverse
acctgaagaaacatacctataccagtg

SEQ ID NO: 17 - DNA, 22 bp, synthetic construct
  source 1..22: mol_type = other DNA; note = ush2a Dexon 68 forward
accgtatgtgttttgtttgcag

SEQ ID NO: 18 - DNA, 27 bp, synthetic construct
  source 1..27: mol_type = other DNA; note = ush2a Dexon 68 reverse
acctgaagaaacatacctataccagtg

SEQ ID NO: 19 - DNA, 22 bp, synthetic construct
  source 1..22: mol_type = other DNA; note = ush2a exon68 KO  forward
atttgtggtgcacagtaacctg

SEQ ID NO: 20 - DNA, 18 bp, synthetic construct
  source 1..18: mol_type = other DNA; note = ush2a exon68 KO  reverse
tttatccgaggtgcgtgg

SEQ ID NO: 21 - DNA, 40 bp, synthetic construct
  source 1..40: mol_type = other DNA; note = ush2a exon68 KO  forward (genescan)
tgtaaaacgacggccagtatttgtggtgcacagtaacctg

SEQ ID NO: 22 - DNA, 36 bp, synthetic construct
  source 1..36: mol_type = other DNA; note = ush2a exon68 KO  forward (genescan)
caggaaacagctatgacctttatccgaggtgcgtgg

SEQ ID NO: 23 - DNA, 20 bp, synthetic construct
  source 1..20: mol_type = other DNA; note = ush2a exon 66-70 forward
agtgggacatgcctcttcag

SEQ ID NO: 24 - DNA, 20 bp, synthetic construct
  source 1..20: mol_type = other DNA; note = ush2a exon 66-70 forward
tgaaccacagctccgtgtag

SEQ ID NO: 25 - DNA, 51 bp, synthetic construct
  source 1..51: mol_type = other DNA; note = USH2A intron 67-69 forward
ggggacaagtttgtacaaaaaagcaggcttcgcctgtgaaatgcacacaaa

SEQ ID NO: 26 - DNA, 49 bp, synthetic construct
  source 1..49: mol_type = other DNA; note = USH2A intron 67-69 forward
ggggaccactttgtacaagaaagctgggtgctgcagtgagctgagattg

SEQ ID NO: 27 - DNA, 20 bp, synthetic construct
  source 1..20: mol_type = other DNA; note = Rho exon 3-5 forward
cggaggtcaacaacgagtct

SEQ ID NO: 28 - DNA, 20 bp, synthetic construct
  source 1..20: mol_type = other DNA; note = Rho exon 3-5 reverse
aggtgtaggggatgggagac

SEQ ID NO: 29 - DNA, 20 bp, synthetic construct
  source 1..20: mol_type = other DNA; note = USH2A exon 66-70 forward
gctgaactgagaacccatcc

SEQ ID NO: 30 - DNA, 20 bp, synthetic construct
  source 1..20: mol_type = other DNA; note = USH2A exon 66-70 forward
aatggccaacaagatcaagc

SEQ ID NO: 31 - DNA, 20 bp, synthetic construct
  source 1..20: mol_type = other DNA; note = USH2A exon 68 inclusion amplicon forward
acaccaccctctacataccg

SEQ ID NO: 32 - DNA, 20 bp, synthetic construct
  source 1..20: mol_type = other DNA; note = USH2A exon 68 inclusion amplicon reverse
ctcgctgtagaactctgtgc

SEQ ID NO: 33 - DNA, 20 bp, synthetic construct
  source 1..20: mol_type = other DNA; note = USH2A exon 68 deletion amplicon forward
tcaccacccaaaaagaatcc

SEQ ID NO: 34 - DNA, 20 bp, synthetic construct
  source 1..20: mol_type = other DNA; note = USH2A exon 68 deletion amplicon reverse
ccagcatcgccattaacact

SEQ ID NO: 35 - DNA, 23 bp, synthetic construct
  source 1..23: mol_type = other DNA; note = USH2A reference amplicon forward
gaaagcctatagtgaggacagca

SEQ ID NO: 36 - DNA, 20 bp, synthetic construct
  source 1..20: mol_type = other DNA; note = USH2A reference amplicon reverse
tctcagtacagccagccaaa

SEQ ID NO: 37 - DNA, 20 bp, synthetic construct
  source 1..20: mol_type = other DNA; note = NANOG forward
ttcttccaccagtcccaaag

SEQ ID NO: 38 - DNA, 20 bp, synthetic construct
  source 1..20: mol_type = other DNA; note = NANOG reverse
ttgctccacattggaaggtt

SEQ ID NO: 39 - DNA, 20 bp, synthetic construct
  source 1..20: mol_type = other DNA; note = SOX2 forward
catcacccacagcaaatgac

SEQ ID NO: 40 - DNA, 20 bp, synthetic construct
  source 1..20: mol_type = other DNA; note = SOX2 reverse
gcaaacttcctgcaaagctc

SEQ ID NO: 41 - DNA, 20 bp, synthetic construct
  source 1..20: mol_type = other DNA; note = PAX6 forward (1)
ttcttccaccagtcccaaag

SEQ ID NO: 42 - DNA, 20 bp, synthetic construct
  source 1..20: mol_type = other DNA; note = PAX6 reverse (1)
ttgctccacattggaaggtt

SEQ ID NO: 43 - DNA, 20 bp, synthetic construct
  source 1..20: mol_type = other DNA; note = PAX6 forward (2)
ttgcacctccaaacaacctt

SEQ ID NO: 44 - DNA, 20 bp, synthetic construct
  source 1..20: mol_type = other DNA; note = PAX6 reverse (2)
gctgttgttgctgttgttgg

SEQ ID NO: 45 - DNA, 20 bp, synthetic construct
  source 1..20: mol_type = other DNA; note = CRX forward
tgcggggatgtgtttccttc

SEQ ID NO: 46 - DNA, 20 bp, synthetic construct
  source 1..20: mol_type = other DNA; note = CRX reverse
gccaaggcgttgacagaata

SEQ ID NO: 47 - DNA, 20 bp, synthetic construct
  source 1..20: mol_type = other DNA; note = RCVRN forward
ctctacgacgtggacggtaa

SEQ ID NO: 48 - DNA, 20 bp, synthetic construct
  source 1..20: mol_type = other DNA; note = RCVRN reverse
caaactggatcagtcgcaga

SEQ ID NO: 49 - DNA, 19 bp, synthetic construct
  source 1..19: mol_type = other DNA; note = RHO forward
gggagaaccatgccatcat

SEQ ID NO: 50 - DNA, 19 bp, synthetic construct
  source 1..19: mol_type = other DNA; note = RHO reverse
tcgtctccgtcttggacac

SEQ ID NO: 51 - DNA, 20 bp, synthetic construct
  source 1..20: mol_type = other DNA; note = NRL forward
gccttcagtctcctgggaag

SEQ ID NO: 52 - DNA, 20 bp, synthetic construct
  source 1..20: mol_type = other DNA; note = NRL reverse
ggaggcactgagctgtaagg

SEQ ID NO: 53 - DNA, 20 bp, synthetic construct
  source 1..20: mol_type = other DNA; note = GAPDH forward
accacagtccatgccatcac

SEQ ID NO: 54 - DNA, 20 bp, synthetic construct
  source 1..20: mol_type = other DNA; note = GAPDH reverse
tccaccaccctgttgctgta

SEQ ID NO: 55 - DNA, 17 bp, synthetic construct
  source 1..17: mol_type = other DNA; note = T7 promoter sequence
taatacgactcactata

SEQ ID NO: 56 - DNA, 23 bp, synthetic construct
  source 1..23: mol_type = other DNA; note = the 20-base target sequence
gttttagagctagaaatagcaag

SEQ ID NO: 57 - skipped

SEQ ID NO: 58 - protein, 3830 aa, Homo sapiens
  source 1..3830: note = Wild-type USH2A protein
MNCPVLSLGSGFLFQVIEMLIFAYFASISLTESRGLFPRLENVGAFKKVSIVPTQAVCGLPDRSTFCHSSAAAESIQFCTQRFCIQDCPYRSSHPTYTALFSAGLSSCITPDKNDLHPNAHSNSASFIFGNHKSCFSSPPSPKLMASFTLAVWLKPEQQGVMCVIEKTVDGQIVFKLTISEKETMFYYRTVNGLQPPIKVMTLGRILVKKWIHLSVQVHQTKISFFINGVEKDHTPFNARTLSGSITDFASGTVQIGQSLNGLEQFVGRMQDFRLYQVALTNREILEVFSGDLLRLHAQSHCRCPGSHPRVHPLAQRYCIPNDAGDTADNRVSRLNPEAHPLSFVNDNDVGTSWVSNVFTNITQLNQGVTISVDLENGQYQVFYIIIQFFSPQPTEIRIQRKKENSLDWEDWQYFARNCGAFGMKNNGDLEKPDSVNCLQLSNFTPYSRGNVTFSILTPGPNYRPGYNNFYNTPSLQEFVKATQIRFHFHGQYYTTETAVNLRHRYYAVDEITISGRCQCHGHADNCDTTSQPYRCLCSQESFTEGLHCDRCLPLYNDKPFRQGDQVYAFNCKPCQCNSHSKSCHYNISVDPFPFEHFRGGGGVCDDCEHNTTGRNCELCKDYFFRQVGADPSAIDVCKPCDCDTVGTRNGSILCDQIGGQCNCKRHVSGRQCNQCQNGFYNLQELDPDGCSPCNCNTSGTVDGDITCHQNSGQCKCKANVIGLRCDHCNFGFKFLRSFNDVGCEPCQCNLHGSVNKFCNPHSGQCECKKEAKGLQCDTCRENFYGLDVTNCKACDCDTAGSLPGTVCNAKTGQCICKPNVEGRQCNKCLEGNFYLRQNNSFLCLPCNCDKTGTINGSLLCNKSTGQCPCKLGVTGLRCNQCEPHRYNLTIDNFQHCQMCECDSLGTLPGTICDPISGQCLCVPNRQGRRCNQCQPGFYISPGNATGCLPCSCHTTGAVNHICNSLTGQCVCQDASIAGQRCDQCKDHYFGFDPQTGRCQPCNCHLSGALNETCHLVTGQCFCKQFVTGSKCDACVPSASHLDVNNLLGCSKTPFQQPPPRGQVQSSSAINLSWSPPDSPNAHWLTYSLLRDGFEIYTTEDQYPYSIQYFLDTDLLPYTKYSYYIETTNVHGSTRSVAVTYKTKPGVPEGNLTLSYIIPIGSDSVTLTWTTLSNQSGPIEKYILSCAPLAGGQPCVSYEGHETSATIWNLVPFAKYDFSVQACTSGGCLHSLPITVTTAQAPPQRLSPPKMQKISSTELHVEWSPPAELNGIIIRYELYMRRLRSTKETTSEESRVFQSSGWLSPHSFVESANENALKPPQTMTTITGLEPYTKYEFRVLAVNMAGSVSSAWVSERTGESAPVFMIPPSVFPLSSYSLNISWEKPADNVTRGKVVGYDINMLSEQSPQQSIPMAFSQLLHTAKSQELSYTVEGLKPYRIYEFTITLCNSVGCVTSASGAGQTLAAAPAQLRPPLVKGINSTTIHLRWFPPEELNGPSPIYQLERRESSLPALMTTMMKGIRFIGNGYCKFPSSTHPVNTDFTGIKASFRTKVPEGLIVFAASPGNQEEYFALQLKKGRLYFLFDPQGSPVEVTTTNDHGKQYSDGKWHEIIAIRHQAFGQITLDGIYTGSSAILNGSTVIGDNTGVFLGGLPRSYTILRKDPEIIQKGFVGCLKDVHFMKNYNPSAIWEPLDWQSSEEQINVYNSWEGCPASLNEGAQFLGAGFLELHPYMFHGGMNFEISFKFRTDQLNGLLLFVYNKDGPDFLAMELKSGILTFRLNTSLAFTQVDLLLGLSYCNGKWNKVIIKKEGSFISASVNGLMKHASESGDQPLVVNSPVYVGGIPQELLNSYQHLCLEQGFGGCMKDVKFTRGAVVNLASVSSGAVRVNLDGCLSTDSAVNCRGNDSILVYQGKEQSVYEGGLQPFTEYLYRVIASHEGGSVYSDWSRGRTTGAAPQSVPTPSRVRSLNGYSIEVTWDEPVVRGVIEKYILKAYSEDSTRPPRMPSASAEFVNTSNLTGILTGLLPFKNYAVTLTACTLAGCTESSHALNISTPQEAPQEVQPPVAKSLPSSLLLSWNPPKKANGIITQYCLYMDGRLIYSGSEENYIVTDLAVFTPHQFLLSACTHVGCTNSSWVLLYTAQLPPEHVDSPVLTVLDSRTIHIQWKQPRKISGILERYVLYMSNHTHDFTIWSVIYNSTELFQDHMLQYVLPGNKYLIKLGACTGGGCTVSEASEALTDEDIPEGVPAPKAHSYSPDSFNVSWTEPEYPNGVITSYGLYLDGILIHNSSELSYRAYGFAPWSLHSFRVQACTAKGCALGPLVENRTLEAPPEGTVNVFVKTQGSRKAHVRWEAPFRPNGLLTHSVLFTGIFYVDPVGNNYTLLNVTKVMYSGEETNLWVLIDGLVPFTNYTVQVNISNSQGSLITDPITIAMPPGAPDGVLPPRLSSATPTSLQVVWSTPARNNAPGSPRYQLQMRSGDSTHGFLELFSNPSASLSYEVSDLQPYTEYMFRLVASNGFGSAHSSWIPFMTAEDKPGPVVPPILLDVKSRMMLVTWQHPRKSNGVITHYNIYLHGRLYLRTPGNVTNCTVMHLHPYTAYKFQVEACTSKGCSLSPESQTVWTLPGAPEGIPSPELFSDTPTSVIISWQPPTHPNGLVENFTIERRVKGKEEVTTLVTLPRSHSMRFIDKTSALSPWTKYEYRVLMSTLHGGTNSSAWVEVTTRPSRPAGVQPPVVTVLEPDAVQVTWKPPLIQNGDILSYEIHMPDPHITLTNVTSAVLSQKVTHLIPFTNYSVTIVACSGGNGYLGGCTESLPTYVTTHPTVPQNVGPLSVIPLSESYVVISWQPPSKPNGPNLRYELLRRKIQQPLASNPPEDLNRWHNIYSGTQWLYEDKGLSRFTTYEYMLFVHNSVGFTPSREVTVTTLAGLPERGANLTASVLNHTAIDVRWAKPTVQDLQGEVEYYTLFWSSATSNDSLKILPDVNSHVIGHLKPNTEYWIFISVFNGVHSINSAGLHATTCDGEPQGMLPPEVVIINSTAVRVIWTSPSNPNGVVTEYSIYVNNKLYKTGMNVPGSFILRDLSPFTIYDIQVEVCTIYACVKSNGTQITTVEDTPSDIPTPTIRGITSRSLQIDWVSPRKPNGIILGYDLLWKTWYPCAKTQKLVQDQSDELCKAVRCQKPESICGHICYSSEAKVCCNGVLYNPKPGHRCCEEKYIPFVLNSTGVCCGGRIQEAQPNHQCCSGYYARILPGEVCCPDEQHNRVSVGIGDSCCGRMPYSTSGNQICCAGRLHDGHGQKCCGRQIVSNDLECCGGEEGVVYNRLPGMFCCGQDYVNMSDTICCSASSGESKAHIKKNDPVPVKCCETELIPKSQKCCNGVGYNPLKYVCSDKISTGMMMKETKECRILCPASMEATEHCGRCDFNFTSHICTVIRGSHNSTGKASIEEMCSSAEETIHTGSVNTYSYTDVNLKPYMTYEYRISAWNSYGRGLSKAVRARTKEDVPQGVSPPTWTKIDNLEDTIVLNWRKPIQSNGPIIYYILLRNGIERFRGTSLSFSDKEGIQPFQEYSYQLKACTVAGCATSSKVVAATTQGVPESILPPSITALSAVALHLSWSVPEKSNGVIKEYQIRQVGKGLIHTDTTDRRQHTVTGLQPYTNYSFTLTACTSAGCTSSEPFLGQTLQAAPEGVWVTPRHIIINSTTVELYWSLPEKPNGLVSQYQLSRNGNLLFLGGSEEQNFTDKNLEPNSRYTYKLEVKTGGGSSASDDYIVQTPMSTPEEIYPPYNITVIGPYSIFVAWIPPGILIPEIPVEYNVLLNDGSVTPLAFSVGHHQSTL
